(19) United States
(12) Patent Application Publication
(10) Pub. No.: US 2016/0040149 A1
(43) Pub. Date: Feb. 11, 2016

(54) Compositions Having Dicamba Decarboxylase Activity and Methods of Use

(71) Applicants: PIONEER HI-BRED INTERNATIONAL INC., Johnston, IA (US); ARZEDA CORP., Seatteal, WA (US)

(72) Inventors: Eric Althoff, Seattle, WA (US); Yi-En Andrew Ban, Seattle, WA (US); Linda A. Castle, Mountain View, CA (US); Daniela Grabs, Seattle, WA (US); Jian Lu, Union City, CA (US); Phillip A. Patten, Portola Valley, CA (US); Yumin Tao, Fremont, CA (US); Alexandre Zanghellini, Seattle, WA (US)

(21) Appl. No.: 14/776,321

(22) PCT Filed: Mar. 14, 2014
(86) PCT No.: PCT/US14/29769

§ 371 Date: Sep. 14, 2015

Related U.S. Application Data
(60) Provisional application No. 61/782,586, filed on Mar. 14, 2013.

(51) Int. Cl. C12N 9/88; C12P 7/22; C12Q 1/68; C12P 7/00; G01N 33/573

(52) U.S. Cl. CPC C12N 9/88; C12P 7/00; G01N 33/573; C12Q 1/6876; C12P 7/22; C12Y 401/01; G01N 2333/988; C12Q 2600/158

(57) ABSTRACT

Compositions and methods comprising polynucleotides and polypeptides having dicamba decarboxylase activity are provided. Further provided are nucleic acid constructs, host cells, plants, plant cells, explants, seeds and grain having the dicamba decarboxylase sequences. Various methods of employing the dicamba decarboxylase sequences are provided. Such methods include, for example, methods for decarboxylating an auxin-analog, method for producing an auxin-analog tolerant plant, plant cell, explant or seed and methods of controlling weeds in a field containing a crop employing the plants and/or seeds disclosed herein. Methods are also provided to identify additional dicamba decarboxylase variants.

### CROSS-REFERENCE TO RELATED APPLICATIONS

[0001] This application claims the benefit of U.S. Provisional Application No. 61/782,586, filed on Mar. 14, 2013, which is incorporated herein by reference in its entirety.

### FIELD OF THE INVENTION

[0002] This invention is in the field of molecular biology. More specifically, this invention pertains to method and compositions comprising polypeptides having dicamba decarboxylase activity and methods of their use.

### REFERENCE TO A SEQUENCE LISTING SUBMITTED AS A TEXT FILE VIA EFS-WEB

[0003] The official copy of the sequence listing is submitted electronically via EFS-Web as an ASCII formatted sequence listing with a file named 36446_{—}0076P1_Sequence_Listing.txt, created on Mar. 14, 2013, and having a size of 2,416,640 bytes and is filed concurrently with the specification. The sequence listing contained in this ASCII formatted document is part of the specification and is herein incorporated by reference in its entirety.

### BACKGROUND OF THE INVENTION

[0004] In the commercial production of crops, it is desirable to easily and quickly eliminate unwanted plants (i.e., “weeds”) from a field of crop plants. An ideal treatment would be one which could be applied to an entire field but which would eliminate only the unwanted plants while leaving the crop plants unharmed. One such treatment system would involve the use of crop plants which are tolerant to a herbicide so that when the herbicide was sprayed on a field of herbicide-tolerant crop plants or an area of cultivation containing the crop, the crop plants would continue to thrive while non-herbicide-tolerant weeds were killed or severely damaged. Ideally, such treatment systems would take advantage of varying herbicide properties so that weed control could provide the best possible combination of flexibility and economy. For example, individual herbicides have different longevities in the field, and some herbicides persist and are effective for a relatively long time after they are applied to a field while other herbicides are quickly broken down into other and/or non-active compounds.

[0005] Crop tolerance to specific herbicides can be conferred by engineering genes into crops which encode appropriate herbicide metabolizing enzymes and/or insensitive herbicide targets. In some cases these enzymes, and the nucleic acids that encode them, originate in a plant. In other cases, they are derived from other organisms, such as microbes. See, e.g., Padgette et al. (1996) “New weed control opportunities: Development of soybeans with a Roundup Ready® gene” and Vasil (1996) “Phosphinothricin-resistant crops,” both in Herbicide-Resistant Crops, ed. Duke (CRC Press, Boca Raton, Fla.) pp. 54-84 and pp. 85-91. Indeed, transgenic plants have been engineered to express a variety of herbicide tolerance genes from a variety of organisms.

[0006] While a number of herbicide-tolerant crop plants are presently commercially available, improvements in every aspect of crop production, weed control options, extension of residual weed control, and improvement in crop yield are continuously in demand. Particularly, due to local and regional variation in dominant weed species, as well as, preferred crop species, a continuing need exists for customized systems of crop protection and weed management which can be adapted to the needs of a particular region, geography, and/or locality. A continuing need therefore exists for compositions and methods of crop protection and weed management.

### BRIEF SUMMARY OF THE INVENTION

[0007] Compositions and methods comprising polynucleotides and polypeptides having dicamba decarboxylase activity are provided. Further provided are nucleic acid constructs, host cells, plants, plant cells, explants, seeds and grain having the dicamba decarboxylase sequences. Various methods of employing the dicamba decarboxylase sequences are provided. Such methods include, for example, methods for decarboxylating an auxin-analog, method for producing an auxin-analog tolerant plant, plant cell, explant or seed and methods of controlling weeds in a field containing a crop employing the plants and/or seeds disclosed herein. Methods are also provided to identify additional dicamba decarboxylase variants.

### BRIEF DESCRIPTION OF THE DRAWINGS

[0008] FIG. 1 provides a schematic showing chemical structures of substrate dicamba (A) and of products including (B) carbon dioxide (C) 2,5-dichloro anisole (D) 4-chloro-3-methoxy phenol and (E) 2,5-dichloro phenol formed from reactions catalyzed by dicamba decarboxylases.

[0009] FIG. 2 shows that soybean germination is not affected by the dicamba decarboxylation product 2,5-dichloro anisole.

[0010] FIG. 3 shows that Arabidopsis root growth on MS medium (A). The root growth is inhibited by dicamba (B, luM; C, 10 uM) but not affected by 4-chloro-3-methoxy phenol (D, luM; E, 10 uM) or 2,5-dichloro phenol (F, luM; G, 10 uM).

[0011] FIG. 4 provides the phylogenic relationship of 108 decarboxylase homologs using CLUSTAL W. The phylogenetic tree was inferred using the Neighbor-Joining method (Saitou and Nei (1987) Molecular Biology and Evolution 4:406-425). The bootstrap consensus tree inferred from 1000 replicates is taken to represent the evolutionary history of the taxa analyzed (Felsenstein (1985) Evolution 39:783-791). Branches corresponding to partitions reproduced in less than 50% bootstrap replicates are collapsed. The evolutionary distances were computed using the Poisson correction method (Zuckerkandl and Pauling (1965) In Evolving Genes and Proteins by Bryson and Vogel, pp. 97-166. Academic Press, New York) and are in the units of the number of amino acid substitutions per site. The analysis involved 108 amino acid sequences. All positions containing gaps and missing data were eliminated. There were a total of 85 positions in the final dataset. Evolutionary analyses were conducted in MEGA5 (Tamura et al. (2011) Molecular Biology and Evolution 28: 2731-2739). Filled circle: Proteins with dicamba decarboxylase activity. Open circle: Proteins with no detected dicamba decarboxylase activity. Open diamond: Proteins with low, but detectable dicamba decarboxylase activity. See Table 1 for sequence sources.

[0012] FIG. 5 shows dicamba decarboxylation activity of SEQ ID NO:1 and SEQ ID NO:109 in a ¹⁴C assay using E. coli recombinant strains. 90 ul of IPTG-induced E. coli cells was incubated with 2 mM [¹⁴C]-carboxyl-labeled dicamba in ¹⁴C assay as described in Example 1. Panel A, reaction at time 0; Panel B, reaction was carried out for one hour; Panel C, reaction was carried out for four hours; Panel D, reaction was carried out for twelve hours. Sample 1 and 2 are two E. coli BL21 cell lines expressing SEQ ID NO:1. Sample 3 and 4 are two E. coli BL21 cell lines expressing SEQ ID NO:109. Sample 5 is a control E. coli BL21 cell line. Darker signal indicates higher dicamba decarboxylase activity.

[0013] FIG. 6 is a substrate concentration versus reaction velocity graph depicting protein kinetic activity improvement of SEQ ID NO:123 over SEQ ID NO:109.

[0014] FIG. 7 shows the distribution of neutral or beneficial amino acid changes respective to position in SEQ ID NO:109 from the N-terminus to the C-terminus of the protein.

[0015] FIG. 8 shows structural locations of amino acid positions of SEQ ID NO:109 where at least one point mutation led to greater than 1.6-fold higher dicamba decarboxylase activity. These positions are mapped with amino acid side chains shown. Arrows: Conserved regions.

[0016] FIG. 9 shows variants with improved activity based from a ¹⁴C-assay screening of the first round of a recombinatorial library in 384-well format. Each square represents ¹⁴CO₂ generated from cells expressing one shuffled protein variant. Darker signal indicates higher dicamba decarboxylase activity. Each marked rectangle has 8 controls including 4 positive proteins (backbone for the library) and 4 negative controls. Reactions were carried out for 2 hours and filters were exposed for 3 days.

[0017] FIG. 10 provides the active site model and reaction mechanism for decarboxylation.

[0018] FIG. 11 provides a three-dimensional representation of the catalytic residues and metal for a decarboxylation reaction in a protein scaffold.

[0019] FIG. 12 provides the constraints for the distances between the key atoms of each sidechain, metal, and dicamba transition state.

[0020] FIG. 13 provides possible loop structures used in computational design of dicamba decarboxylase.

[0021] FIG. 14 provides the structures of various auxin-analog herbicides.

### DETAILED DESCRIPTION OF THE INVENTION

[0022] The present inventions now will be described more fully hereinafter with reference to the accompanying drawings, in which some, but not all embodiments of the inventions are shown. Indeed, these inventions may be embodied in many different forms and should not be construed as limited to the embodiments set forth herein; rather, these embodiments are provided so that this disclosure will satisfy applicable legal requirements. Like numbers refer to like elements throughout.

[0023] Many modifications and other embodiments of the inventions set forth herein will come to mind to one skilled in the art to which these inventions pertain having the benefit of the teachings presented in the foregoing descriptions and the associated drawings. Therefore, it is to be understood that the inventions are not to be limited to the specific embodiments disclosed and that modifications and other embodiments are intended to be included within the scope of the appended claims. Although specific terms are employed herein, they are used in a generic and descriptive sense only and not for purposes of limitation.

### I. Overview

[0024] Enzymatic decarboxylation reactions, with the exception of orotidine decarboxylase have not been studied or researched in detail. There is little information about their mechanism or enzymatic rates and no significant work done to improve their catalytic efficiency nor their substrate specificity. Decarboxylation reactions catalyze the release of CO₂ from their substrates which is quite remarkable given the energy requirements to break a carbon-carbon sigma bond, one of the strongest known in nature.

[0025] In examining the structure of the auxin-analog, dicamba, the importance of the carboxylate (—CO₂— or —CO₂H) to its function was identified and enzymes were successfully identified and designed that would remove the carboxylate moiety efficiently rendering a significantly different product than dicamba. Such work is of particular interest for the auxin-analog herbicides, such as dicamba (3,6-dichloro-2-methoxy benzoic acid) and 2,4-D or derivatives or metabolic products thereof. These compounds have been used in agriculture to effectively control broadleaf weeds in crop fields including corn and wheat for many years. They have also been shown to be effective in controlling recently emerged weed species that have gained resistance to the widely-used herbicide glyphosate. However, crops of dicot species including soybean are extremely sensitive to dicamba. To enable the application of auxin-analog herbicides in these crop fields, an auxin-analog herbicide tolerance trait is needed.

[0026] Methods and compositions are provided which allow for the decarboxylation of auxin-analogs. Specifically, polypeptides having dicamba decarboxylase activity are provided. As demonstrated herein, dicamba decarboxylase polypeptides can decarboxylate auxin-analogs, including auxin-analog herbicides, such as dicamba, or derivatives or metabolic products thereof, and thereby reduce the herbicidal toxicity of the auxin-analog to plants.

### II. Compositions

[0027] A. Dicamba Decarboxylase Polypeptides and Polynucleotides Encoding the Same

[0028] As used herein, a “dicamba decarboxylase polypeptide” or a polypeptide having “dicamba decarboxylase activity” refers to a polypeptide having the ability to decarboxylate dicamba. “Decarboxylate” or “decarboxylation” refers to the removal of a COOH (carboxyl group), releasing CO₂ and replacing the carboxyl group with a proton. FIG. 1 provides a schematic showing chemical structures of dicamba and products that can result following decarboxylation of dicamba. As shown in FIG. 1, along with a simple decarboxylation to produce CO₂, a variety of factors during the reaction can influence which additional biproducts are formed. With regard to FIG. 1, C is the simplest decarboxylation where the CO₂ is replaced by a proton, D is the product after decarboxylation and chlorohydrolase activity, and E is the product after decarboxylation and demethylase or methoxyhydrolase activity.

[0029] A variety of dicamba decarboxylases are provided, including but not limited to, the sequences set forth in SEQ ID NOS: 1, 2, 3, 4, 5, 6, 7, 8, 9, 10, 11, 12, 13, 14, 15, 16, 17, 18, 19, 20, 21, 22, 23, 24, 25, 26, 27, 28, 29, 30, 31, 32, 33, 34, 35, 36, 37, 38, 39, 40, 41, 42, 43, 44, 45, 46, 47, 48, 49, 50, 51, 52, 53, 54, 55, 56, 57, 58, 59, 60, 61, 62, 63, 64, 65, 66, 67, 68, 69, 70, 71, 72, 73, 74, 75, 76, 77, 78, 79, 80, 81, 82, 83, 84, 85, 86, 87, 88, 89, 90, 91, 92, 93, 94, 95, 96, 97, 98, 99, 100, 101, 102, 103, 104, 105, 106, 107, 108, 109, 110, 111, 112, 113, 114, 115, 116, 117, 118, 119, 120, 121, 122, 123, 124, 125, 126, 127, 128 or 129 or active variant or fragments thereof and the polynucleotides encoding the same.

[0030] In further embodiments, a variety of dicamba decarboxylases are provided, including but not limited to, the sequences set forth in SEQ ID NOS: 1, 2, 3, 4, 5, 6, 7, 8, 9, 10, 11, 12, 13, 14, 15, 16, 17, 18, 19, 20, 21, 22, 23, 24, 25, 26, 27, 28, 29, 30, 31, 32, 33, 34, 35, 36, 37, 38, 39, 40, 41, 42, 43, 44, 45, 46, 47, 48, 49, 50, 51, 52, 53, 54, 55, 56, 57, 58, 59, 60, 61, 62, 63, 64, 65, 66, 67, 68, 69, 70, 71, 72, 73, 74, 75, 76, 77, 78, 79, 80, 81, 82, 83, 84, 85, 86, 87, 88, 89, 90, 91, 92, 93, 94, 95, 96, 97, 98, 99, 100, 101, 102, 103, 104, 105, 106, 107, 108, 109, 110, 111, 112, 113, 114, 115, 116, 117, 118, 119, 120, 121, 122, 123, 124, 125, 126, 127, 128, 129, 130, 131, 132, 133, 134, 135, 136, 137, 138, 139, 140, 141, 142, 143, 144, 145, 146, 147, 148, 149, 150, 151, 152, 153, 154, 155, 156, 157, 158, 159, 160, 161, 162, 163, 164, 165, 166, 167, 168, 169, 170, 171, 172, 173, 174, 175, 176, 177, 178, 179, 180, 181, 182, 183, 184, 185, 186, 187, 188, 189, 190, 191, 192, 193, 194, 195, 196, 197, 198, 199, 200, 201, 202, 203, 204, 205, 206, 207, 208, 209, 210, 211, 212, 213, 214, 215, 216, 217, 218, 219, 220, 221, 222, 223, 224, 225, 226, 227, 228, 229, 230, 231, 232, 233, 234, 235, 236, 237, 238, 239, 240, 241, 242, 243, 244, 245, 246, 247, 248, 249, 250, 251, 252, 253, 254, 255, 256, 257, 258, 259, 260, 261, 262, 263, 264, 265, 266, 267, 268, 269, 270, 271, 272, 273, 274, 275, 276, 277, 278, 279, 280, 281, 282, 283, 284, 285, 286, 287, 288, 289, 290, 291, 292, 293, 294, 295, 296, 297, 298, 299, 300, 301, 302, 303, 304, 305, 306, 307, 308, 309, 310, 311, 312, 313, 314, 315, 316, 317, 318, 319, 320, 321, 322, 323, 324, 325, 326, 327, 328, 329, 330, 331, 332, 333, 334, 335, 336, 337, 338, 339, 340, 341, 342, 343, 344, 345, 346, 347, 348, 349, 350, 351, 352, 353, 354, 355, 356, 357, 358, 359, 360, 361, 362, 363, 364, 365, 366, 367, 368, 369, 370, 371, 372, 373, 374, 375, 376, 377, 378, 379, 380, 381, 382, 383, 384, 385, 386, 387, 388, 389, 390, 391, 392, 393, 394, 395, 396, 397, 398, 399, 400, 401, 402, 403, 404, 405, 406, 407, 408, 409, 410, 411, 412, 413, 414, 415, 416, 417, 418, 419, 420, 421, 422, 423, 424, 425, 426, 427, 428, 429, 430, 431, 432, 433, 434, 435, 436, 437, 438, 439, 440, 441, 442, 443, 444, 445, 446, 447, 448, 449, 450, 451, 452, 453, 454, 455, 456, 457, 458, 459, 460, 461, 462, 463, 464, 465, 466, 467, 468, 469, 470, 471, 472, 473, 474, 475, 476, 477, 478, 479, 480, 481, 482, 483, 484, 485, 486, 487, 488, 489, 490, 491, 492, 493, 494, 495, 496, 497, 498, 499, 500, 501, 502, 503, 504, 505, 506, 507, 508, 509, 510, 511, 512, 513, 514, 515, 516, 517, 518, 519, 520, 521, 522, 523, 524, 525, 526, 527, 528, 529, 530, 531, 532, 533, 534, 535, 536, 537, 538, 539, 540, 541, 542, 543, 544, 545, 546, 547, 548, 549, 550, 551, 552, 553, 554, 555, 556, 557, 558, 559, 560, 561, 562, 563, 564, 565, 566, 567, 568, 569, 570, 571, 572, 573, 574, 575, 576, 577, 578, 579, 580, 581, 582, 583, 584, 585, 586, 587, 588, 589, 590, 591, 592, 593, 594, 595, 596, 597, 598, 599, 600, 601, 602, 603, 604, 605, 606, 607, 608, 609, 610, 611, 612, 613, 614, 615, 616, 617, 618, 619, 620, 621, 622, 623, 624, 625, 626, 627, 628, 629, 630, 631, 632, 633, 634, 635, 636, 637, 638, 639, 640, 641, 642, 643, 644, 645, 646, 647, 648, 649, 650, 651, 652, 653, 654, 655, 656, 657, 658, 659, 660, 661, 662, 663, 664, 665, 666, 667, 668, 669, 670, 671, 672, 673, 674, 675, 676, 677, 678, 679, 680, 681, 682, 683, 684, 685, 686, 687, 688, 689, 690, 691, 692, 693, 694, 695, 696, 697, 698, 699, 700, 701, 702, 703, 704, 705, 706, 707, 708, 709, 710, 711, 712, 713, 714, 715, 716, 717, 718, 719, 720, 721, 722, 723, 724, 725, 726, 727, 728, 729, 730, 731, 732, 733, 734, 735, 736, 737, 738, 739, 740, 741, 742, 743, 744, 745, 746, 747, 748, 749, 750, 751, 752, 753, 754, 755, 756, 757, 758, 759, 760, 761, 762, 763, 764, 765, 766, 767, 768, 769, 770, 771, 772, 773, 774, 775, 776, 777, 778, 779, 780, 781, 782, 783, 784, 785, 786, 787, 788, 789, 790, 791, 792, 793, 794, 795, 796, 797, 798, 799, 800, 801, 802, 803, 804, 805, 806, 807, 808, 809, 810, 811, 812, 813, 814, 815, 816, 817, 818, 819, 820, 821, 822, 823, 824, 825, 826, 827, 828, 829, 830, 831, 832, 833, 834, 835, 836, 837, 838, 839, 840, 841, 842, 843, 844, 845, 846, 847, 848, 849, 850, 851, 852, 853, 854, 855, 856, 857, 858, 859, 860, 861, 862, 863, 864, 865, 866, 867, 868, 869, 870, 871, 872, 873, 874, 875, 876, 877, 878, 879, 880, 881, 882, 883, 884, 885, 886, 887, 888, 889, 890, 891, 892, 893, 894, 895, 896, 897, 898, 899, 900, 901, 902, 903, 904, 905, 906, 907, 908, 909, 910, 911, 912, 913, 914, 915, 916, 917, 918, 919, 920, 921, 922, 923, 924, 925, 926, 927, 928, 929, 930, 931, 932, 933, 934, 935, 936, 937, 938, 939, 940, 941, 942, 943, 944, 945, 946, 947, 948, 949, 950, 951, 952, 953, 954, 955, 956, 957, 958, 959, 960, 961, 962, 963, 964, 965, 966, 967, 968, 969, 970, 971, 972, 973, 974, 975, 976, 977, 978, 979, 980, 981, 982, 983, 984, 985, 986, 987, 988, 989, 990, 991, 992, 993, 994, 995, 996, 997, 998, 999, 1000, 1001, 1002, 1003, 1004, 1005, 1006, 1007, 1008, 1009, 1010, 1011, 1012, 1013, 1014, 1015, 1016, 1017, 1018, 1019, 1020, 1021, 1022, 1023, 1024, 1025, 1026, 1027, 1028, 1029, 1030, 1031, 1032, 1033, 1034, 1035, 1036, 1037, 1038, 1039, 1040, 1041, and 1042, or active variant or fragments thereof and the polynucleotides encoding the same.

[0031] Further provided herein are a variety of dicamba decarboxylases are provided, including but not limited to, a polypeptide having dicamba decarboxylase activity; wherein the polypeptide having dicamba decarboxylase activity further comprises:

```
(SEQ ID NO: 1041)
                                5 10
Met Ala Xaa Gly Lys Val Xaa Leu Glu Glu His Xaa
                15 20
Ala Ile Xaa Xaa Thr Leu Xaa Xaa Xaa Ala Xaa Phe
25 30 35
Val Pro Xaa Xaa Tyr Xaa Lys Xaa Leu Xaa His Arg
                        40 45
Leu Xaa Asp Xaa Gln Xaa Xaa Arg Leu Xaa Xaa Met
        50 55 60
Asp Xaa His Xaa Ile Xaa Xaa Met Xaa Leu Ser Leu
                                65 70
Xaa Ala Xaa Xaa Xaa Gln Xaa Xaa Xaa Xaa Arg Xaa
                75 80
Xaa Ala Xaa Xaa Xaa Ala Xaa Arg Xaa Asn Asp Xaa
85 90 95
Xaa Ala Glu Xaa Xaa Ala Xaa Xaa Xaa Xaa Arg Phe
                        100 105
Xaa Ala Phe Xaa Xaa Xaa Pro Xaa Xaa Asp Xaa Xaa
        110 115 120
Xaa Ala Xaa Xaa Glu Leu Gln Arg Xaa Val Xaa Xaa
                                125 130
Leu Gly Xaa Val Gly Ala Xaa Val Asn Gly Phe Ser
                135 140
Xaa Glu Gly Asp Xaa Xaa Thr Pro Leu Tyr Tyr Asp
145 150 155
Leu Pro Xaa Tyr Arg Pro Phe Trp Xaa Glu Val Glu
                        160 165
Lys Leu Asp Val Pro Phe Tyr Leu His Pro Xaa Asn
        170 175 180
Pro Leu Pro Gln Asp Xaa Arg Ile Tyr Xaa Gly His
                                185 190
Pro Trp Leu Leu Gly Pro Thr Trp Ala Phe Ala Gln
                195 200
Glu Thr Xaa Val His Ala Leu Arg Leu Met Ala Ser
205 210 215
Gly Leu Phe Asp Glu His Pro Xaa Leu Xaa Ile Ile
                        220 225
Leu Gly His Xaa Gly Glu Gly Leu Pro Tyr Met Xaa
        230 235 240
Xaa Arg Ile Asp His Arg Xaa Xaa Xaa Xaa Xaa Xaa
                                245 250
Pro Pro Xaa Tyr Xaa Ala Lys Xaa Xaa Phe Xaa Asp
                255 260
Tyr Phe Xaa Glu Asn Phe Xaa Xaa Thr Thr Ser Gly
265 270 275
Asn Phe Arg Thr Gln Thr Leu Ile Asp Ala Ile Leu
                        280 285
Glu Xaa Gly Ala Asp Arg Ile Leu Phe Ser Thr Asp
        290 295 300
Trp Pro Phe Glu Asn Ile Asp His Ala Xaa Xaa Trp
                                305 310
Phe Xaa Xaa Xaa Ser Ile Ala Glu Ala Asp Arg Xaa
                315 320
Lys Ile Gly Xaa Thr Asn Ala Xaa Xaa Leu Phe Lys
325
Leu Asp Xaa Xaa,
```

wherein

[0032] Xaa at position 3 is Gln, Gly, Met or Pro; Xaa at position 7 is Ala or Cys; Xaa at position 12 is Phe, Met, Val or Trp; Xaa at position 15 is Pro or Thr; Xaa at position 16 is Glu or Ala; Xaa at position 19 is Gln, Glu or Asn; Xaa at position 20 is Asp, Cys, Phe, Met or Trp; Xaa at position 21 is Ser, Ala, Gly or Val; Xaa at position 23 is Gly or Asp; Xaa at position 27 is Gly, Ala, Asp, Glu, Pro, Arg, Ser, Thr or Tyr; Xaa at position 28 is Asp, Cys, Glu, Phe or Gly; Xaa at position 30 is Trp, Leu or Val; Xaa at position 32 is Glu or Val; Xaa at position 34 is Gln, Ala or Trp; Xaa at position 38 is Leu, Ile, Met, Arg, Thr or Val; Xaa at position 40 is Ile, Met, Ser or Val; Xaa at position 42 is Asp, Ala, Gly, Lys, Met, Ser or Thr; Xaa at position 43 is Thr, Cys, Asp, Glu, Gly, Met, Gln, Arg or Tyr; Xaa at position 46 is Lys, Gly, Asn or Arg; Xaa at position 47 is Leu, Cys, Glu, Lys or Ser; Xaa at position 50 is Ala, Lys, Arg, Ser, Thr or Val; Xaa at position 52 is Gly, Glu, Leu, Asn or Gln; Xaa at position 54 is Glu or Gly; Xaa at position 55 is Thr or Leu; Xaa at position 57 is Ile, Ala or Val; Xaa at position 61 is Asn, Ala, Gly, Leu or Ser; Xaa at position 63 is Pro or Val; Xaa at position 64 is Ala, Gly, His or Ser; Xaa at position 65 is Val or Cys; Xaa at position 67 is Ala or Ser; Xaa at position 68 is Ile or Gln; Xaa at position 69 is Pro, Gly, Arg, Ser or Val; Xaa at position 70 is Asp or His; Xaa at position 72 is Arg, Lys or Val; Xaa at position 73 is Lys, Glu, Gln or Arg; Xaa at position 75 is Ile or Arg; Xaa at position 76 is Glu or Gly; Xaa at position 77 is Ile, Met, Arg, Ser or Val; Xaa at position 79 is Arg or Gln; Xaa at position 81 is Ala or Ser; Xaa at position 84 is Val, Cys, Phe or Met; Xaa at position 85 is Leu or Ala; Xaa at position 88 is Glu or Lys; Xaa at position 89 is Cys, Ile or Val; Xaa at position 91 is Lys or Arg; Xaa at position 92 is Arg or Lys; Xaa at position 93 is Pro, Ala or Arg; Xaa at position 94 is Asp, Cys, Gly, Gln or Ser; Xaa at position 97 is Leu, Lys or Arg; Xaa at position 100 is Ala, Gly or Ser; Xaa at position 101 is Ala or Gly; Xaa at position 102 is Leu or Val; Xaa at position 104 is Leu or Met; Xaa at position 105 is Gln or Gly; Xaa at position 107 is Pro or Val; Xaa at position 108 is Asp or Glu; Xaa at position 109 is Ala, Gly, Met or Val; Xaa at position 111 is Thr, Ala, Cys, Gly, Ser or Val; Xaa at position 112 is Glu, Gly, Arg or Ser; Xaa at position 117 is Cys, Ala or Thr; Xaa at position 119 is Asn, Ala, Cys, Arg or Ser; Xaa at position 120 is Asp or Thr; Xaa at position 123 is Phe or Leu; Xaa at position 127 is Leu or Met; Xaa at position 133 is Gln or Val; Xaa at position 137 is Gly, Ala or Glu; Xaa at position 138 is Gln or Gly; Xaa at position 147 is Gln or Ile; Xaa at position 153 is Gly or Lys; Xaa at position 167 is Arg or Glu; Xaa at position 174 is Ser or Ala; Xaa at position 178 is Asp or Glu; Xaa at position 195 is Ala or Gly; Xaa at position 212 is Arg, Gly or Gln; Xaa at position 214 is Asn or Gln; Xaa at position 220 is Met or Leu; Xaa at position 228 is Met or Leu; Xaa at position 229 is Trp or Tyr; Xaa at position 235 is Val or Ile; Xaa at position 236 is Ala, Gly, Gln or Trp; Xaa at position 237 is Trp or Leu; Xaa at position 238 is Val, Gly or Pro; Xaa at position 239 is Lys, Ala, Asp, Glu, Gly or His; Xaa at position 240 is Leu, Ala, Asp, Glu, Gly or Val; Xaa at position 243 is Arg, Ala, Asp, Lys, Ser or Val; Xaa at position 245 is Pro or Ala; Xaa at position 248 is Arg or Lys; Xaa at position 249 is Arg or Pro; Xaa at position 251 is Met or Val; Xaa at position 255 is Asn, Ala, Leu, Met, Gln, Arg or Ser; Xaa at position 259 is His or Trp; Xaa at position 260 is Ile or Leu; Xaa at position 278 is Ile or Leu; Xaa at position 298 is Ser, Ala or Thr; Xaa at position 299 is Asp or Ala; Xaa at position 302 is Asn or Ala; Xaa at position 303 is Ala, Cys, Asp, Glu or Ser; Xaa at position 304 is Thr or Val; Xaa at position 312 is Val or Leu; Xaa at position 316 is Arg or Ser; Xaa at position 320 is Arg or Leu; Xaa at position 321 is Arg or Asn; Xaa at position 327 is Gly, Leu, Gln or Val; Xaa at position 328 is Ala, Cys, Asp, Arg, Ser, Thr or Val; wherein one or more amino acid(s) designated by Xaa in SEQ ID NO: 1041 is an amino acid different from the corresponding amino acid of SEQ ID NO: 109; and wherein the polypeptide having dicamba decarboxylase activity has increased dicamba decarboxylase activity compared to the polypeptide of SEQ ID NO: 109.

[0033] Further provided herein are a variety of dicamba decarboxylases are provided, including but not limited to, a polypeptide having dicamba decarboxylase activity; wherein the polypeptide having dicamba decarboxylase activity further comprises:

```
(SEQ ID NO: 1042)
                                5 10
Met Ala Gln Gly Xaa Val Ala Leu Glu Glu His Phe
                15 20
Ala Ile Pro Xaa Thr Leu Xaa Asp Xaa Ala Xaa Phe
25 30 35
Val Pro Xaa Xaa Tyr Xaa Lys Glu Leu Gln His Arg
                        40 45
Leu Xaa Asp Xaa Gln Asp Xaa Arg Leu Xaa Xaa Met
        50 55 60
Asp Xaa His Xaa Ile Xaa Thr Met Xaa Leu Ser Leu
                                65 70
Xaa Ala Xaa Xaa Val Gln Xaa Ile Xaa Asp Arg Xaa
                75 80
Xaa Ala Ile Glu Xaa Ala Xaa Arg Ala Asn Asp Xaa
85 90 95
Leu Ala Glu Glu Xaa Ala Lys Arg Pro Xaa Arg Phe
                        100 105
Leu Ala Phe Ala Ala Leu Pro Xaa Gln Asp Xaa Xaa
        110 115 120
Ala Ala Xaa Xaa Glu Leu Gln Arg Xaa Val Xaa Xaa
                                125 130
Leu Gly Phe Val Gly Ala Xaa Val Asn Gly Phe Ser
                135 140
Xaa Glu Gly Asp Gly Gln Thr Pro Leu Tyr Tyr Asp
145 150 155
Leu Pro Gln Tyr Arg Pro Phe Trp Xaa Glu Val Glu
                        160 165
Lys Leu Asp Val Pro Phe Tyr Leu His Pro Arg Asn
        170 175 180
Pro Leu Pro Gln Asp Xaa Arg Ile Tyr Asp Gly His
                                185 190
Pro Trp Leu Leu Gly Pro Thr Trp Ala Phe Ala Gln
                195 200
Glu Thr Ala Val His Ala Leu Arg Leu Met Ala Ser
205 210 215
Gly Leu Phe Asp Glu His Pro Xaa Leu Xaa Ile Ile
                        220 225
Leu Gly His Xaa Gly Glu Gly Leu Pro Tyr Met Met
        230 235 240
Xaa Arg Ile Asp His Arg Xaa Xaa Trp Val Xaa Xaa
                                245 250
Pro Pro Xaa Tyr Xaa Ala Lys Arg Arg Phe Met Asp
                255 260
Tyr Phe Xaa Glu Asn Phe Xaa Ile Thr Thr Ser Gly
265 270 275
Asn Phe Arg Thr Gln Thr Leu Ile Asp Ala Ile Leu
                        280 285
Glu Ile Gly Ala Asp Arg Ile Leu Phe Xaa Thr Asp
        290 295 300
Trp Pro Phe Glu Asn Ile Asp His Ala Xaa Xaa Trp
                                305 310
Phe Xaa Xaa Xaa Ser Ile Ala Glu Ala Asp Arg Xaa
                315 320
Lys Ile Gly Arg Thr Asn Ala Xaa Xaa Leu Phe Lys
325
Leu Asp Xaa Xaa
```

wherein
Xaa at position 5 is Lys or Leu; Xaa at position 16 is Glu or Ala; Xaa at position 19 is Gln or Asn; Xaa at position 21 is Ser or Ala; Xaa at position 23 is Gly or Asp; Xaa at position 27 is Gly or Ser; Xaa at position 28 is Asp, Cys or Glu; Xaa at position 30 is Trp or Leu; Xaa at position 38 is Leu or Met; Xaa at position 40 is Ile or Met; Xaa at position 43 is Thr, Glu or Gln; Xaa at position 46 is Lys, Asn or Arg; Xaa at position 47 is Leu or Glu; Xaa at position 50 is Ala, Lys or Arg; Xaa at position 52 is Gly, Glu or Gin; Xaa at position 54 is Glu or Gly; Xaa at position 57 is Ile or Val; Xaa at position 61 is Asn or Ala; Xaa at position 63 is Pro or Val; Xaa at position 64 is Ala or Gly; Xaa at position 67 is Ala, Gly or Ser; Xaa at position 69 is Pro, Gly or Val; Xaa at position 72 is Arg or Val; Xaa at position 73 is Lys, Glu or Gln; Xaa at position 77 is Ile or Leu; Xaa at position 79 is Arg or Lys; Xaa at position 84 is Val, Phe or Met; Xaa at position 89 is Cys or Val; Xaa at position 94 is Asp or Gly; Xaa at position 104 is Leu or Met; Xaa at position 107 is Pro or Val; Xaa at position 108 is Asp or Glu; Xaa at position 111 is Thr or Ser; Xaa at position 112 is Glu or Ser; Xaa at position 117 is Cys or Thr; Xaa at position 119 is Asn, Ala or Arg; Xaa at position 120 is Asp or Thr; Xaa at position 127 is Leu or Met; Xaa at position 133 is Gin or Val; Xaa at position 153 is Gly or Lys; Xaa at position 174 is Ser or Ala; Xaa at position 212 is Arg or Gly; Xaa at position 214 is Asn or Gln; Xaa at position 220 is Met or Leu; Xaa at position 229 is Trp or Tyr; Xaa at position 235 is Val or Ile; Xaa at position 236 is Ala or Gly; Xaa at position 239 is Lys, Glu or His; Xaa at position 240 is Leu, Ala or Glu; Xaa at position 243 is Arg or Asp; Xaa at position 245 is Pro or Ala; Xaa at position 255 is Asn or Leu; Xaa at position 259 is His or Trp; Xaa at position 286 is Ser or Ala; Xaa at position 298 is Ser, Ala or Thr; Xaa at position 299 is Asp or Ala; Xaa at position 302 is Asn or Ala; Xaa at position 303 is Ala or Glu; Xaa at position 304 is Thr or Ala; Xaa at position 312 is Val or Leu; Xaa at position 320 is Arg or Leu; Xaa at position 321 is Arg or Asn; Xaa at position 327 is Gly, Leu or Val; Xaa at position 328 is Ala, Asp, Arg, Ser or Thr; wherein one or more amino acid(s) designated by Xaa in SEQ ID NO: 1042 is an amino acid different from the corresponding amino acid of SEQ ID NO: 109; and wherein the polypeptide having dicamba decarboxylase activity has increased dicamba decarboxylase activity compared to the polypeptide of SEQ ID NO: 109.

[0034] Further provided herein are a variety of dicamba decarboxylases are provided, including but not limited to, a polypeptide having dicamba decarboxylase activity; wherein the polypeptide having dicamba decarboxylase activity further comprises:

```
(SEQ ID NO: 1043)
                                5 10
Met Ala Xaa Gly Lys Val Xaa Leu Glu Glu His Xaa
                15 20
Ala Ile Xaa Xaa Thr Leu Xaa Xaa Xaa Ala Xaa Phe
25 30 35
Val Pro Xaa Xaa Tyr Xaa Lys Xaa Leu Xaa His Arg
                        40 45
Leu Xaa Asp Xaa Gln Xaa Xaa Arg Leu Xaa Xaa Met
        50 55 60
Asp Xaa His Xaa Ile Xaa Xaa Met Xaa Leu Ser Leu
                                65 70
Xaa Ala Xaa Xaa Xaa Gln Xaa Xaa Xaa Xaa Arg Xaa
                75 80
Xaa Ala Xaa Xaa Xaa Ala Xaa Arg Xaa Asn Asp Xaa
85 90 95
Xaa Ala Glu Xaa Xaa Ala Xaa Xaa Xaa Xaa Arg Phe
                        100 105
Xaa Ala Phe Xaa Xaa Xaa Pro Xaa Xaa Asp Xaa Xaa
        110 115 120
Xaa Ala Xaa Xaa Glu Leu Gln Arg Xaa Val Xaa Xaa
                                125 130
Leu Gly Xaa Val Gly Ala Xaa Val Asn Gly Phe Ser
                135 140
Xaa Glu Gly Asp Xaa Xaa Thr Pro Leu Tyr Tyr Asp
145 150 155
Leu Pro Xaa Tyr Arg Pro Phe Trp Xaa Glu Val Glu
                        160 165
Lys Leu Asp Val Pro Phe Tyr Leu His Pro Xaa Asn
        170 175 180
Pro Leu Pro Gln Asp Xaa Arg Ile Tyr Xaa Gly His
                                185 190
Pro Trp Leu Leu Gly Pro Thr Trp Ala Phe Ala Gln
                195 200
Glu Thr Xaa Val His Ala Leu Arg Leu Met Ala Ser
205 210 215
Gly Leu Phe Asp Glu His Pro Xaa Leu Xaa Ile Ile
                        220 225
Leu Gly His Xaa Gly Glu Gly Leu Pro Tyr Met Xaa
        230 235 240
Xaa Arg Ile Asp His Arg Xaa Xaa Xaa Xaa Xaa Xaa
                                245 250
Pro Pro Xaa Tyr Xaa Ala Lys Xaa Xaa Phe Xaa Asp
                255 260
Tyr Phe Xaa Glu Asn Phe Xaa Xaa Thr Thr Ser Gly
265 270 275
Asn Phe Arg Thr Gln Thr Leu Ile Asp Ala Ile Leu
                        280 285
Glu Xaa Gly Ala Asp Arg Ile Leu Phe Ser Thr Asp
        290 295 300
Trp Pro Phe Glu Asn Ile Asp His Ala Xaa Xaa Trp
                                305 310
Phe Xaa Xaa Xaa Ser Ile Ala Glu Ala Asp Arg Xaa
                315 320
Lys Ile Gly Xaa Thr Asn Ala Xaa Xaa Leu Phe Lys
325
Leu Asp Xaa Xaa,
```

wherein

[0035] Xaa at position 3 is Gin, Gly, Met or Pro; Xaa at position 7 is Ala or Cys; Xaa at position 12 is Phe, Met, Val or Trp; Xaa at position 15 is Pro or Thr; Xaa at position 16 is Glu or Ala; Xaa at position 19 is Gln, Glu or Asn; Xaa at position 20 is Asp, Cys, Phe, Met or Trp; Xaa at position 21 is Ser, Ala, Gly or Val; Xaa at position 23 is Gly or Asp; Xaa at position 27 is Gly, Ala, Asp, Glu, Pro, Arg, Ser, Thr or Tyr; Xaa at position 28 is Asp, Cys, Glu, Phe or Gly; Xaa at position 30 is Trp, Leu or Val; Xaa at position 32 is Glu or Val; Xaa at position 34 is Gln, Ala or Trp; Xaa at position 38 is Leu, Ile, Met, Arg, Thr or Val; Xaa at position 40 is Ile, Met, Ser or Val; Xaa at position 42 is Asp, Ala, Gly, Lys, Met, Ser or Thr; Xaa at position 43 is Thr, Cys, Asp, Glu, Gly, Met, Gin, Arg or Tyr; Xaa at position 46 is Lys, Gly, Asn or Arg; Xaa at position 47 is Leu, Cys, Glu, Lys or Ser; Xaa at position 50 is Ala, Lys, Arg, Ser, Thr or Val; Xaa at position 52 is Gly, Glu, Leu, Asn or Gln; Xaa at position 54 is Glu or Gly; Xaa at position 55 is Thr or Leu; Xaa at position 57 is Ile, Ala or Val; Xaa at position 61 is Asn, Ala, Gly, Leu or Ser; Xaa at position 63 is Pro or Val; Xaa at position 64 is Ala, Gly, His or Ser; Xaa at position 65 is Val or Cys; Xaa at position 67 is Ala or Ser; Xaa at position 68 is Ile or Gln; Xaa at position 69 is Pro, Gly, Arg, Ser or Val; Xaa at position 70 is Asp or His; Xaa at position 72 is Arg, Lys or Val; Xaa at position 73 is Lys, Glu, Gln or Arg; Xaa at position 75 is Ile or Arg; Xaa at position 76 is Glu or Gly; Xaa at position 77 is Ile, Met, Arg, Ser or Val; Xaa at position 79 is Arg or Gln; Xaa at position 81 is Ala or Ser; Xaa at position 84 is Val, Cys, Phe or Met; Xaa at position 85 is Leu or Ala; Xaa at position 88 is Glu or Lys; Xaa at position 89 is Cys, Ile or Val; Xaa at position 91 is Lys or Arg; Xaa at position 92 is Arg or Lys; Xaa at position 93 is Pro, Ala or Arg; Xaa at position 94 is Asp, Cys, Gly, Gln or Ser; Xaa at position 97 is Leu, Lys or Arg; Xaa at position 100 is Ala, Gly or Ser; Xaa at position 101 is Ala or Gly; Xaa at position 102 is Leu or Val; Xaa at position 104 is Leu or Met; Xaa at position 105 is Gln or Gly; Xaa at position 107 is Pro or Val; Xaa at position 108 is Asp or Glu; Xaa at position 109 is Ala, Gly, Met or Val; Xaa at position 111 is Thr, Ala, Cys, Gly, Ser or Val; Xaa at position 112 is Glu, Gly, Arg or Ser; Xaa at position 117 is Cys, Ala or Thr; Xaa at position 119 is Asn, Ala, Cys, Arg or Ser; Xaa at position 120 is Asp or Thr; Xaa at position 123 is Phe or Leu; Xaa at position 127 is Leu or Met; Xaa at position 133 is Gln or Val; Xaa at position 137 is Gly, Ala or Glu; Xaa at position 138 is Gln or Gly; Xaa at position 147 is Gln or Ile; Xaa at position 153 is Gly or Lys; Xaa at position 167 is Arg or Glu; Xaa at position 174 is Ser or Ala; Xaa at position 178 is Asp or Glu; Xaa at position 195 is Ala or Gly; Xaa at position 212 is Arg, Gly or Gln; Xaa at position 214 is Asn or Gln; Xaa at position 220 is Met or Leu; Xaa at position 228 is Met or Leu; Xaa at position 229 is Trp or Tyr; Xaa at position 235 is Asn, Val or Ile; Xaa at position 236 is Ala, Gly, Gln or Trp; Xaa at position 237 is Trp or Leu; Xaa at position 238 is Val, Gly or Pro; Xaa at position 239 is Lys, Ala, Asp, Glu, Gly or His; Xaa at position 240 is Leu, Ala, Asp, Glu, Gly or Val; Xaa at position 243 is Arg, Ala, Asp, Lys, Ser or Val; Xaa at position 245 is Pro or Ala; Xaa at position 248 is Arg or Lys; Xaa at position 249 is Arg or Pro; Xaa at position 251 is Met or Val; Xaa at position 255 is Asn, Ala, Leu, Met, Gln, Arg or Ser; Xaa at position 259 is His or Trp; Xaa at position 260 is Ile or Leu; Xaa at position 278 is Ile or Leu; Xaa at position 298 is Ser, Ala or Thr; Xaa at position 299 is Asp or Ala; Xaa at position 302 is Asn or Ala; Xaa at position 303 is Ala, Cys, Asp, Glu or Ser; Xaa at position 304 is Thr or Val; Xaa at position 312 is Val or Leu; Xaa at position 316 is Arg or Ser; Xaa at position 320 is Arg or Leu; Xaa at position 321 is Arg or Asn; Xaa at position 327 is Gly, Leu, Gln or Val; Xaa at position 328 is Ala, Cys, Asp, Arg, Ser, Thr or Val; wherein one or more amino acid(s) designated by Xaa in SEQ ID NO: 1043 is an amino acid different from the corresponding amino acid of SEQ ID NO: 1; and wherein the polypeptide having dicamba decarboxylase activity has increased dicamba decarboxylase activity compared to the polypeptide of SEQ ID NO: 1.

[0036] Further provided herein are a variety of dicamba decarboxylases are provided, including but not limited to, a polypeptide having dicamba decarboxylase activity; wherein the polypeptide having dicamba decarboxylase activity further comprises:

```
(SEQ ID NO: 1044)
                                5 10
Met Ala Gln Gly Xaa Val Ala Leu Glu Glu His Phe
                15 20
Ala Ile Pro Xaa Thr Leu Xaa Asp Xaa Ala Xaa Phe
25 30 35
Val Pro Xaa Xaa Tyr Xaa Lys Glu Leu Gln His Arg
                        40 45
Leu Xaa Asp Xaa Gln Asp Xaa Arg Leu Xaa Xaa Met
        50 55 60
Asp Xaa His Xaa Ile Xaa Thr Met Xaa Leu Ser Leu
                                65 70
Xaa Ala Xaa Xaa Val Gln Xaa Ile Xaa Asp Arg Xaa
                75 80
Xaa Ala Ile Glu Xaa Ala Xaa Arg Ala Asn Asp Xaa
85 90 95
Leu Ala Glu Glu Xaa Ala Lys Arg Pro Xaa Arg Phe
                        100 105
Leu Ala Phe Ala Ala Leu Pro Xaa Gln Asp Xaa Xaa
        110 115 120
Ala Ala Xaa Xaa Glu Leu Gln Arg Xaa Val Xaa Xaa
                                125 130
Leu Gly Phe Val Gly Ala Xaa Val Asn Gly Phe Ser
                135 140
Xaa Glu Gly Asp Gly Gln Thr Pro Leu Tyr Tyr Asp
145 150 155
Leu Pro Gln Tyr Arg Pro Phe Trp Xaa Glu Val Glu
                        160 165
Lys Leu Asp Val Pro Phe Tyr Leu His Pro Arg Asn
        170 175 180
Pro Leu Pro Gln Asp Xaa Arg Ile Tyr Asp Gly His
                                185 190
Pro Trp Leu Leu Gly Pro Thr Trp Ala Phe Ala Gln
                195 200
Glu Thr Ala Val His Ala Leu Arg Leu Met Ala Ser
205 210 215
Gly Leu Phe Asp Glu His Pro Xaa Leu Xaa Ile Ile
                        220 225
Leu Gly His Xaa Gly Glu Gly Leu Pro Tyr Met Met
        230 235 240
Xaa Arg Ile Asp His Arg Xaa Xaa Trp Val Xaa Xaa
                                245 250
Pro Pro Xaa Tyr Xaa Ala Lys Arg Arg Phe Met Asp
                255 260
Tyr Phe Xaa Glu Asn Phe Xaa Ile Thr Thr Ser Gly
265 270 275
Asn Phe Arg Thr Gln Thr Leu Ile Asp Ala Ile Leu
                        280 285
Glu Ile Gly Ala Asp Arg Ile Leu Phe Xaa Thr Asp
        290 295 300
Trp Pro Phe Glu Asn Ile Asp His Ala Xaa Xaa Trp
                                305 310
Phe Xaa Xaa Xaa Ser Ile Ala Glu Ala Asp Arg Xaa
                315 320
Lys Ile Gly Arg Thr Asn Ala Xaa Xaa Leu Phe Lys
325
Leu Asp Xaa Xaa
```

wherein
Xaa at position 5 is Lys or Leu; Xaa at position 16 is Glu or Ala; Xaa at position 19 is Gln or Asn; Xaa at position 21 is Ser or Ala; Xaa at position 23 is Gly or Asp; Xaa at position 27 is Gly or Ser; Xaa at position 28 is Asp, Cys or Glu; Xaa at position 30 is Trp or Leu; Xaa at position 38 is Leu or Met; Xaa at position 40 is Ile or Met; Xaa at position 43 is Thr, Glu or Gln; Xaa at position 46 is Lys, Asn or Arg; Xaa at position 47 is Leu or Glu; Xaa at position 50 is Ala, Lys or Arg; Xaa at position 52 is Gly, Glu or Gln; Xaa at position 54 is Glu or Gly; Xaa at position 57 is Ile or Val; Xaa at position 61 is Asn or Ala; Xaa at position 63 is Pro or Val; Xaa at position 64 is Ala or Gly; Xaa at position 67 is Ala, Gly or Ser; Xaa at position 69 is Pro, Gly or Val; Xaa at position 72 is Arg or Val; Xaa at position 73 is Lys, Glu or Gin; Xaa at position 77 is Ile or Leu; Xaa at position 79 is Arg or Lys; Xaa at position 84 is Val, Phe or Met; Xaa at position 89 is Cys or Val; Xaa at position 94 is Asp or Gly; Xaa at position 104 is Leu or Met; Xaa at position 107 is Pro or Val; Xaa at position 108 is Asp or Glu; Xaa at position 111 is Thr or Ser; Xaa at position 112 is Glu or Ser; Xaa at position 117 is Cys or Thr; Xaa at position 119 is Asn, Ala or Arg; Xaa at position 120 is Asp or Thr; Xaa at position 127 is Leu or Met; Xaa at position 133 is Gln or Val; Xaa at position 153 is Gly or Lys; Xaa at position 174 is Ser or Ala; Xaa at position 212 is Arg or Gly; Xaa at position 214 is Asn or Gln; Xaa at position 220 is Met or Leu; Xaa at position 229 is Trp or Tyr; Xaa at position 235 is Asn, Val or Ile; Xaa at position 236 is Ala or Gly; Xaa at position 239 is Lys, Glu or His; Xaa at position 240 is Leu, Ala or Glu; Xaa at position 243 is Arg or Asp; Xaa at position 245 is Pro or Ala; Xaa at position 255 is Asn or Leu; Xaa at position 259 is His or Trp; Xaa at position 286 is Ser or Ala; Xaa at position 298 is Ser, Ala or Thr; Xaa at position 299 is Asp or Ala; Xaa at position 302 is Asn or Ala; Xaa at position 303 is Ala or Glu; Xaa at position 304 is Thr or Ala; Xaa at position 312 is Val or Leu; Xaa at position 320 is Arg or Leu; Xaa at position 321 is Arg or Asn; Xaa at position 327 is Gly, Leu or Val; Xaa at position 328 is Ala, Asp, Arg, Ser or Thr; wherein one or more amino acid(s) designated by Xaa in SEQ ID NO: 1044 is an amino acid different from the corresponding amino acid of SEQ ID NO: 1; and wherein the polypeptide having dicamba decarboxylase activity has increased dicamba decarboxylase activity compared to the polypeptide of SEQ ID NO: 1.

[0037] Further provided herein is the geometry of the active site of the dicamba decarboxylase enzymes. See Example 5. Thus, in other embodiments, dicamba decarboxylases are provided which comprise a catalytic residue geometry as set forth in Table 3 or a substantially similar geometry. As demonstrated herein, computational methods were performed to develop the minimal requirements and constraints for a dicamba decarboxylase active site. See Example 5 and Table 3 which provide the catalytic residue geometry for a dicamba decarboxylase polypeptide. Briefly, as summarized in both Table 3 and Table 6, catalytic residues #1-4 serve primarily to coordinate the metal within the active site. Most frequently they are histidine, aspartic acid, and glutamic acid. Catalytic residue #5 serves as the proton donor which adds the proton to the aromatic ring displacing the carboxylate. These five catalytic residues are critical to the dicamba decarboxylase activity. Thus, in specific embodiments, the dicamba decarboxylase comprises an active site having a catalytic residue geometry as set forth in Table 3 or having a substantially similar catalytic residue geometry.

[0038] As used herein, “a substantially similar catalytic residue geometry” is intended to describe a metal cation chelated directly by four catalytic residues composed of histidine, aspartic acid, and/or glutamic acid (but can also have tyrosine, asparagine, glutamine cysteine at at least one position) in a trigonal bipyramidal or other three-dimensional metal-coordination arrangements as allowed by the coordinated metal and its oxidative state. In specific embodiments, the four catalytic residues are composed of histidine, aspartic acid, and/or glutamic acid. Metal cations can include, zinc, cobalt, iron, nickel, copper, or manganese. (See, Huo, et al. Biochemistry. 2012 51:5811-21; Glueck, et al, Chem. Soc. Rev., 2010, 39, 313-328; Liu, et al, Biochemistry. 2006 45:10407-10411; Li, et al, Biochemistry 2006, 45:6628-6634, each of which is herein incorporated by reference). In one specific embodiment, the metal ion comprises zinc. Additionally a histidine residue (or other similarly polar side chain) is located near the 5^{th} ligand position of the metal and is positioned so as to donate a proton during the carboxylation step along the enzyme's mechanistic pathway. Substantially similar catalytic geometry is further meant to comprise of this constellation of 5 catalytic residues all within at least 1.5, 1, 0.9, 0.8, 0.7, 0.6, 0.5, 0.4, 0.3, 0.2, or 0.1 Angstroms of their ideal median value as shown in Table 3. In other embodiments, the substantially similar catalytic geometry comprises this constellation of 5 catalytic residues all within at least 0.5 Angstroms of their ideal or median value as shown in Table 3. It is recognized that a substantially similar catalytic residue geometry can comprise any combination of catalytic residues, metals and median distance to the metal atom disclosed above or in Table 3.

[0039] As demonstrated herein, the dicamba decarboxylase catalytic residue geometry set forth in Table 3 was present in natural protein structures or by homology modeling of the protein sequences. Additional active site residues were computationally designed in order to introduce dicamba binding and dicamba decarboxylation activity into an alpha-amino-beta-carboxymuconate-epsilon-semialdehyde-decarboxylase (SEQ ID NO:95) and a 4-oxalomesaconate hydratase (SEQ ID NO:100) by these methods. Neither of the native proteins have dicamba decarboxylase activity. Variants of the carboxymuconate-epsilon-semialdehyde-decarboxylase (SEQ ID NO:95) having the dicamba decarboxylase catalytic residue geometry set forth in Table 3 were generated and are set forth in SEQ ID NOS: 117, 118, and 119. Each of these sequences are shown herein to have dicamba decarboxylase activity. Likewise, variants of the oxalomesaconate hydratase (SEQ ID NO:100) having the dicamba decarboxylase catalytic residue geometry set forth in Table 3 were generated and are set forth in SEQ ID NOS: 120, 121 and 122. Each of these sequences are shown herein to have dicamba decarboxylase activity. In addition, polypeptides with native dicamba decarboxylase activity such as the amidohydrolase set forth in SEQ ID NO: 41 and the 2,6-dihydroxybenzoate decarboxylase set forth in SEQ ID NO:1 already possessed the dicamba decarboxylase catalytic residue geometry set forth in Table 3. The active site around the catalytic residues was computationally designed to recognize, bind, and be more catalytically efficient towards dicamba. The variants of these sequences having the catalytic residue geometry set forth in Table 3 are found in SEQ ID NOS; 109, 110, 111, 112, 113, 114, 115, and 116. Each of these variant sequences having the dicamba decarboxylase catalytic residue geometry set forth in Table 3 displays an increase in dicamba decarboxylase activity. Thus, dicamba decarboxylases are provided which have a catalytic residue geometry as set forth in Table 3 or having a substantially similar catalytic residue geometry.

[0040] i. Active Fragments of Dicamba Decarboxylase Sequences

[0041] Fragments and variants of dicamba decarboxylase polynucleotides and polypeptides can be employed in the methods and compositions disclosed herein. By “fragment” is intended a portion of the polynucleotide or a portion of the amino acid sequence and hence protein encoded thereby. Fragments of a polynucleotide may encode protein fragments that retain dicamba decarboxylase activity. Thus, fragments of a nucleotide sequence may range from at least about 20 nucleotides, about 50 nucleotides, about 100 nucleotides, and up to the full-length polynucleotide encoding the dicamba decarboxylase polypeptides.

[0042] A fragment of a dicamba decarboxylase polynucleotide that encodes a biologically active portion of a dicamba decarboxylase polypeptide will encode at least 50, 75, 100, 150, 175, 200, 225, 250, 275, 300, 325, 350, 375, 400, 410, 415, 420, 425, 430, 435, 440, 480, 500, 550, 600, 620 contiguous amino acids, or up to the total number of amino acids present in a full-length dicamba decarboxylase polypeptide as set forth in, for example, SEQ ID NO: 1, 2, 3, 4, 5, 6, 7, 8, 9, 10, 11, 12, 13, 14, 15, 16, 17, 18, 19, 20, 21, 22, 23, 24, 25, 26, 27, 28, 29, 30, 31, 32, 33, 34, 35, 36, 37, 38, 39, 40, 41, 42, 43, 44, 45, 46, 47, 48, 49, 50, 51, 52, 53, 54, 55, 56, 57, 58, 59, 60, 61, 62, 63, 64, 65, 66, 67, 68, 69, 70, 71, 72, 73, 74, 75, 76, 77, 78, 79, 80, 81, 82, 83, 84, 85, 86, 87, 88, 89, 90, 91, 92, 93, 94, 95, 96, 97, 98, 99, 100, 101, 102, 103, 104, 105, 106, 107, 108, 109, 110, 111, 112, 113, 114, 115, 116, 117, 118, 119, 120, 121, 122, 123, 124, 125, 126, 127, 128 or 129 or an active variant or fragment thereof. A fragment of a dicamba decarboxylase polynucleotide that encodes a biologically active portion of a dicamba decarboxylase polypeptide will comprise the total number of amino acids present in a full-length dicamba decarboxylase polypeptide as set forth in, for example, SEQ ID NO: 1, 2, 3, 4, 5, 6, 7, 8, 9, 10, 11, 12, 13, 14, 15, 16, 17, 18, 19, 20, 21, 22, 23, 24, 25, 26, 27, 28, 29, 30, 31, 32, 33, 34, 35, 36, 37, 38, 39, 40, 41, 42, 43, 44, 45, 46, 47, 48, 49, 50, 51, 52, 53, 54, 55, 56, 57, 58, 59, 60, 61, 62, 63, 64, 65, 66, 67, 68, 69, 70, 71, 72, 73, 74, 75, 76, 77, 78, 79, 80, 81, 82, 83, 84, 85, 86, 87, 88, 89, 90, 91, 92, 93, 94, 95, 96, 97, 98, 99, 100, 101, 102, 103, 104, 105, 106, 107, 108, 109, 110, 111, 112, 113, 114, 115, 116, 117, 118, 119, 120, 121, 122, 123, 124, 125, 126, 127, 128, 129, 130, 131, 132, 133, 134, 135, 136, 137, 138, 139, 140, 141, 142, 143, 144, 145, 146, 147, 148, 149, 150, 151, 152, 153, 154, 155, 156, 157, 158, 159, 160, 161, 162, 163, 164, 165, 166, 167, 168, 169, 170, 171, 172, 173, 174, 175, 176, 177, 178, 179, 180, 181, 182, 183, 184, 185, 186, 187, 188, 189, 190, 191, 192, 193, 194, 195, 196, 197, 198, 199, 200, 201, 202, 203, 204, 205, 206, 207, 208, 209, 210, 211, 212, 213, 214, 215, 216, 217, 218, 219, 220, 221, 222, 223, 224, 225, 226, 227, 228, 229, 230, 231, 232, 233, 234, 235, 236, 237, 238, 239, 240, 241, 242, 243, 244, 245, 246, 247, 248, 249, 250, 251, 252, 253, 254, 255, 256, 257, 258, 259, 260, 261, 262, 263, 264, 265, 266, 267, 268, 269, 270, 271, 272, 273, 274, 275, 276, 277, 278, 279, 280, 281, 282, 283, 284, 285, 286, 287, 288, 289, 290, 291, 292, 293, 294, 295, 296, 297, 298, 299, 300, 301, 302, 303, 304, 305, 306, 307, 308, 309, 310, 311, 312, 313, 314, 315, 316, 317, 318, 319, 320, 321, 322, 323, 324, 325, 326, 327, 328, 329, 330, 331, 332, 333, 334, 335, 336, 337, 338, 339, 340, 341, 342, 343, 344, 345, 346, 347, 348, 349, 350, 351, 352, 353, 354, 355, 356, 357, 358, 359, 360, 361, 362, 363, 364, 365, 366, 367, 368, 369, 370, 371, 372, 373, 374, 375, 376, 377, 378, 379, 380, 381, 382, 383, 384, 385, 386, 387, 388, 389, 390, 391, 392, 393, 394, 395, 396, 397, 398, 399, 400, 401, 402, 403, 404, 405, 406, 407, 408, 409, 410, 411, 412, 413, 414, 415, 416, 417, 418, 419, 420, 421, 422, 423, 424, 425, 426, 427, 428, 429, 430, 431, 432, 433, 434, 435, 436, 437, 438, 439, 440, 441, 442, 443, 444, 445, 446, 447, 448, 449, 450, 451, 452, 453, 454, 455, 456, 457, 458, 459, 460, 461, 462, 463, 464, 465, 466, 467, 468, 469, 470, 471, 472, 473, 474, 475, 476, 477, 478, 479, 480, 481, 482, 483, 484, 485, 486, 487, 488, 489, 490, 491, 492, 493, 494, 495, 496, 497, 498, 499, 500, 501, 502, 503, 504, 505, 506, 507, 508, 509, 510, 511, 512, 513, 514, 515, 516, 517, 518, 519, 520, 521, 522, 523, 524, 525, 526, 527, 528, 529, 530, 531, 532, 533, 534, 535, 536, 537, 538, 539, 540, 541, 542, 543, 544, 545, 546, 547, 548, 549, 550, 551, 552, 553, 554, 555, 556, 557, 558, 559, 560, 561, 562, 563, 564, 565, 566, 567, 568, 569, 570, 571, 572, 573, 574, 575, 576, 577, 578, 579, 580, 581, 582, 583, 584, 585, 586, 587, 588, 589, 590, 591, 592, 593, 594, 595, 596, 597, 598, 599, 600, 601, 602, 603, 604, 605, 606, 607, 608, 609, 610, 611, 612, 613, 614, 615, 616, 617, 618, 619, 620, 621, 622, 623, 624, 625, 626, 627, 628, 629, 630, 631, 632, 633, 634, 635, 636, 637, 638, 639, 640, 641, 642, 643, 644, 645, 646, 647, 648, 649, 650, 651, 652, 653, 654, 655, 656, 657, 658, 659, 660, 661, 662, 663, 664, 665, 666, 667, 668, 669, 670, 671, 672, 673, 674, 675, 676, 677, 678, 679, 680, 681, 682, 683, 684, 685, 686, 687, 688, 689, 690, 691, 692, 693, 694, 695, 696, 697, 698, 699, 700, 701, 702, 703, 704, 705, 706, 707, 708, 709, 710, 711, 712, 713, 714, 715, 716, 717, 718, 719, 720, 721, 722, 723, 724, 725, 726, 727, 728, 729, 730, 731, 732, 733, 734, 735, 736, 737, 738, 739, 740, 741, 742, 743, 744, 745, 746, 747, 748, 749, 750, 751, 752, 753, 754, 755, 756, 757, 758, 759, 760, 761, 762, 763, 764, 765, 766, 767, 768, 769, 770, 771, 772, 773, 774, 775, 776, 777, 778, 779, 780, 781, 782, 783, 784, 785, 786, 787, 788, 789, 790, 791, 792, 793, 794, 795, 796, 797, 798, 799, 800, 801, 802, 803, 804, 805, 806, 807, 808, 809, 810, 811, 812, 813, 814, 815, 816, 817, 818, 819, 820, 821, 822, 823, 824, 825, 826, 827, 828, 829, 830, 831, 832, 833, 834, 835, 836, 837, 838, 839, 840, 841, 842, 843, 844, 845, 846, 847, 848, 849, 850, 851, 852, 853, 854, 855, 856, 857, 858, 859, 860, 861, 862, 863, 864, 865, 866, 867, 868, 869, 870, 871, 872, 873, 874, 875, 876, 877, 878, 879, 880, 881, 882, 883, 884, 885, 886, 887, 888, 889, 890, 891, 892, 893, 894, 895, 896, 897, 898, 899, 900, 901, 902, 903, 904, 905, 906, 907, 908, 909, 910, 911, 912, 913, 914, 915, 916, 917, 918, 919, 920, 921, 922, 923, 924, 925, 926, 927, 928, 929, 930, 931, 932, 933, 934, 935, 936, 937, 938, 939, 940, 941, 942, 943, 944, 945, 946, 947, 948, 949, 950, 951, 952, 953, 954, 955, 956, 957, 958, 959, 960, 961, 962, 963, 964, 965, 966, 967, 968, 969, 970, 971, 972, 973, 974, 975, 976, 977, 978, 979, 980, 981, 982, 983, 984, 985, 986, 987, 988, 989, 990, 991, 992, 993, 994, 995, 996, 997, 998, 999, 1000, 1001, 1002, 1003, 1004, 1005, 1006, 1007, 1008, 1009, 1010, 1011, 1012, 1013, 1014, 1015, 1016, 1017, 1018, 1019, 1020, 1021, 1022, 1023, 1024, 1025, 1026, 1027, 1028, 1029, 1030, 1031, 1032, 1033, 1034, 1035, 1036, 1037, 1038, 1039, 1040, 1041, and 1042.

[0043] In other embodiments, a fragment of a dicamba decarboxylase polynucleotide that encodes a biologically active portion of a dicamba decarboxylase polypeptide will encode at least 50, 75, 100, 150, 175, 200, 225, 250, 275, 300, 325, 328 contiguous amino acids, or up to the total number of amino acids present in a full-length dicamba decarboxylase polypeptide as set forth in, for example, a polypeptide having dicamba decarboxylase activity; wherein the polypeptide having dicamba decarboxylase activity further comprises:

```
(SEQ ID NO: 1041)
                                5 10
Met Ala Xaa Gly Lys Val Xaa Leu Glu Glu His Xaa
                15 20
Ala Ile Xaa Xaa Thr Leu Xaa Xaa Xaa Ala Xaa Phe
25 30 35
Val Pro Xaa Xaa Tyr Xaa Lys Xaa Leu Xaa His Arg
                        40 45
Leu Xaa Asp Xaa Gln Xaa Xaa Arg Leu Xaa Xaa Met
        50 55 60
Asp Xaa His Xaa Ile Xaa Xaa Met Xaa Leu Ser Leu
                                65 70
Xaa Ala Xaa Xaa Xaa Gln Xaa Xaa Xaa Xaa Arg Xaa
                75 80
Xaa Ala Xaa Xaa Xaa Ala Xaa Arg Xaa Asn Asp Xaa
85 90 95
Xaa Ala Glu Xaa Xaa Ala Xaa Xaa Xaa Xaa Arg Phe
                        100 105
Xaa Ala Phe Xaa Xaa Xaa Pro Xaa Xaa Asp Xaa Xaa
        110 115 120
Xaa Ala Xaa Xaa Glu Leu Gln Arg Xaa Val Xaa Xaa
                                125 130
Leu Gly Xaa Val Gly Ala Xaa Val Asn Gly Phe Ser
                135 140
Xaa Glu Gly Asp Xaa Xaa Thr Pro Leu Tyr Tyr Asp
145 150 155
Leu Pro Xaa Tyr Arg Pro Phe Trp Xaa Glu Val Glu
                        160 165
Lys Leu Asp Val Pro Phe Tyr Leu His Pro Xaa Asn
        170 175 180
Pro Leu Pro Gln Asp Xaa Arg Ile Tyr Xaa Gly His
                                185 190
Pro Trp Leu Leu Gly Pro Thr Trp Ala Phe Ala Gln
                195 200
Glu Thr Xaa Val His Ala Leu Arg Leu Met Ala Ser
205 210 215
Gly Leu Phe Asp Glu His Pro Xaa Leu Xaa Ile Ile
                        220 225
Leu Gly His Xaa Gly Glu Gly Leu Pro Tyr Met Xaa
        230 235 240
Xaa Arg Ile Asp His Arg Xaa Xaa Xaa Xaa Xaa Xaa
                                245 250
Pro Pro Xaa Tyr Xaa Ala Lys Xaa Xaa Phe Xaa Asp
                255 260
Tyr Phe Xaa Glu Asn Phe Xaa Xaa Thr Thr Ser Gly
265 270 275
Asn Phe Arg Thr Gln Thr Leu Ile Asp Ala Ile Leu
                        280 285
Glu Xaa Gly Ala Asp Arg Ile Leu Phe Ser Thr Asp
        290 295 300
Trp Pro Phe Glu Asn Ile Asp His Ala Xaa Xaa Trp
                                305 310
Phe Xaa Xaa Xaa Ser Ile Ala Glu Ala Asp Arg Xaa
                315 320
Lys Ile Gly Xaa Thr Asn Ala Xaa Xaa Leu Phe Lys
325
Leu Asp Xaa Xaa,
```

wherein
Xaa at position 3 is Gln, Gly, Met or Pro; Xaa at position 7 is Ala or Cys; Xaa at position 12 is Phe, Met, Val or Trp; Xaa at position 15 is Pro or Thr; Xaa at position 16 is Glu or Ala; Xaa at position 19 is Gln, Glu or Asn; Xaa at position 20 is Asp, Cys, Phe, Met or Trp; Xaa at position 21 is Ser, Ala, Gly or Val; Xaa at position 23 is Gly or Asp; Xaa at position 27 is Gly, Ala, Asp, Glu, Pro, Arg, Ser, Thr or Tyr; Xaa at position 28 is Asp, Cys, Glu, Phe or Gly; Xaa at position 30 is Trp, Leu or Val; Xaa at position 32 is Glu or Val; Xaa at position 34 is Gln, Ala or Trp; Xaa at position 38 is Leu, Ile, Met, Arg, Thr or Val; Xaa at position 40 is Ile, Met, Ser or Val; Xaa at position 42 is Asp, Ala, Gly, Lys, Met, Ser or Thr; Xaa at position 43 is Thr, Cys, Asp, Glu, Gly, Met, Gin, Arg or Tyr; Xaa at position 46 is Lys, Gly, Asn or Arg; Xaa at position 47 is Leu, Cys, Glu, Lys or Ser; Xaa at position 50 is Ala, Lys, Arg, Ser, Thr or Val; Xaa at position 52 is Gly, Glu, Leu, Asn or Gln; Xaa at position 54 is Glu or Gly; Xaa at position 55 is Thr or Leu; Xaa at position 57 is Ile, Ala or Val; Xaa at position 61 is Asn, Ala, Gly, Leu or Ser; Xaa at position 63 is Pro or Val; Xaa at position 64 is Ala, Gly, His or Ser; Xaa at position 65 is Val or Cys; Xaa at position 67 is Ala or Ser; Xaa at position 68 is Ile or Gln; Xaa at position 69 is Pro, Gly, Arg, Ser or Val; Xaa at position 70 is Asp or His; Xaa at position 72 is Arg, Lys or Val; Xaa at position 73 is Lys, Glu, Gln or Arg; Xaa at position 75 is Ile or Arg; Xaa at position 76 is Glu or Gly; Xaa at position 77 is Ile, Met, Arg, Ser or Val; Xaa at position 79 is Arg or Gln; Xaa at position 81 is Ala or Ser; Xaa at position 84 is Val, Cys, Phe or Met; Xaa at position 85 is Leu or Ala; Xaa at position 88 is Glu or Lys; Xaa at position 89 is Cys, Ile or Val; Xaa at position 91 is Lys or Arg; Xaa at position 92 is Arg or Lys; Xaa at position 93 is Pro, Ala or Arg; Xaa at position 94 is Asp, Cys, Gly, Gln or Ser; Xaa at position 97 is Leu, Lys or Arg; Xaa at position 100 is Ala, Gly or Ser; Xaa at position 101 is Ala or Gly; Xaa at position 102 is Leu or Val; Xaa at position 104 is Leu or Met; Xaa at position 105 is Gln or Gly; Xaa at position 107 is Pro or Val; Xaa at position 108 is Asp or Glu; Xaa at position 109 is Ala, Gly, Met or Val; Xaa at position 111 is Thr, Ala, Cys, Gly, Ser or Val; Xaa at position 112 is Glu, Gly, Arg or Ser; Xaa at position 117 is Cys, Ala or Thr; Xaa at position 119 is Asn, Ala, Cys, Arg or Ser; Xaa at position 120 is Asp or Thr; Xaa at position 123 is Phe or Leu; Xaa at position 127 is Leu or Met; Xaa at position 133 is Gln or Val; Xaa at position 137 is Gly, Ala or Glu; Xaa at position 138 is Gin or Gly; Xaa at position 147 is Gln or Ile; Xaa at position 153 is Gly or Lys; Xaa at position 167 is Arg or Glu; Xaa at position 174 is Ser or Ala; Xaa at position 178 is Asp or Glu; Xaa at position 195 is Ala or Gly; Xaa at position 212 is Arg, Gly or Gln; Xaa at position 214 is Asn or Gln; Xaa at position 220 is Met or Leu; Xaa at position 228 is Met or Leu; Xaa at position 229 is Trp or Tyr; Xaa at position 235 is Val or Ile; Xaa at position 236 is Ala, Gly, Gln or Trp; Xaa at position 237 is Trp or Leu; Xaa at position 238 is Val, Gly or Pro; Xaa at position 239 is Lys, Ala, Asp, Glu, Gly or His; Xaa at position 240 is Leu, Ala, Asp, Glu, Gly or Val; Xaa at position 243 is Arg, Ala, Asp, Lys, Ser or Val; Xaa at position 245 is Pro or Ala; Xaa at position 248 is Arg or Lys; Xaa at position 249 is Arg or Pro; Xaa at position 251 is Met or Val; Xaa at position 255 is Asn, Ala, Leu, Met, Gln, Arg or Ser; Xaa at position 259 is His or Trp; Xaa at position 260 is Ile or Leu; Xaa at position 278 is Ile or Leu; Xaa at position 298 is Ser, Ala or Thr; Xaa at position 299 is Asp or Ala; Xaa at position 302 is Asn or Ala; Xaa at position 303 is Ala, Cys, Asp, Glu or Ser; Xaa at position 304 is Thr or Val; Xaa at position 312 is Val or Leu; Xaa at position 316 is Arg or Ser; Xaa at position 320 is Arg or Leu; Xaa at position 321 is Arg or Asn; Xaa at position 327 is Gly, Leu, Gln or Val; Xaa at position 328 is Ala, Cys, Asp, Arg, Ser, Thr or Val; wherein one or more amino acid(s) designated by Xaa in SEQ ID NO: 1041 is an amino acid different from the corresponding amino acid of SEQ ID NO: 109; and wherein the polypeptide having dicamba decarboxylase activity has increased dicamba decarboxylase activity compared to the polypeptide of SEQ ID NO: 109.

[0044] In other embodiments, a fragment of a dicamba decarboxylase polynucleotide that encodes a biologically active portion of a dicamba decarboxylase polypeptide will encode at least 50, 75, 100, 150, 175, 200, 225, 250, 275, 300, 325, 328 contiguous amino acids, or up to the total number of amino acids present in a full-length dicamba decarboxylase polypeptide as set forth in, for example, a polypeptide having dicamba decarboxylase activity; wherein the polypeptide having dicamba decarboxylase activity further comprises:

```
(SEQ ID NO: 1042)
                                5 10
Met Ala Gln Gly Xaa Val Ala Leu Glu Glu His Phe
                15 20
Ala Ile Pro Xaa Thr Leu Xaa Asp Xaa Ala Xaa Phe
25 30 35
Val Pro Xaa Xaa Tyr Xaa Lys Glu Leu Gln His Arg
                        40 45
Leu Xaa Asp Xaa Gln Asp Xaa Arg Leu Xaa Xaa Met
        50 55 60
Asp Xaa His Xaa Ile Xaa Thr Met Xaa Leu Ser Leu
                                65 70
Xaa Ala Xaa Xaa Val Gln Xaa Ile Xaa Asp Arg Xaa
                75 80
Xaa Ala Ile Glu Xaa Ala Xaa Arg Ala Asn Asp Xaa
85 90 95
Leu Ala Glu Glu Xaa Ala Lys Arg Pro Xaa Arg Phe
                        100 105
Leu Ala Phe Ala Ala Leu Pro Xaa Gln Asp Xaa Xaa
        110 115 120
Ala Ala Xaa Xaa Glu Leu Gln Arg Xaa Val Xaa Xaa
                                125 130
Leu Gly Phe Val Gly Ala Xaa Val Asn Gly Phe Ser
                135 140
Xaa Glu Gly Asp Gly Gln Thr Pro Leu Tyr Tyr Asp
145 150 155
Leu Pro Gln Tyr Arg Pro Phe Trp Xaa Glu Val Glu
                        160 165
Lys Leu Asp Val Pro Phe Tyr Leu His Pro Arg Asn
        170 175 180
Pro Leu Pro Gln Asp Xaa Arg Ile Tyr Asp Gly His
                                185 190
Pro Trp Leu Leu Gly Pro Thr Trp Ala Phe Ala Gln
                195 200
Glu Thr Ala Val His Ala Leu Arg Leu Met Ala Ser
205 210 215
Gly Leu Phe Asp Glu His Pro Xaa Leu Xaa Ile Ile
                        220 225
Leu Gly His Xaa Gly Glu Gly Leu Pro Tyr Met Met
        230 235 240
Xaa Arg Ile Asp His Arg Xaa Xaa Trp Val Xaa Xaa
                                245 250
Pro Pro Xaa Tyr Xaa Ala Lys Arg Arg Phe Met Asp
                255 260
Tyr Phe Xaa Glu Asn Phe Xaa Ile Thr Thr Ser Gly
265 270 275
Asn Phe Arg Thr Gln Thr Leu Ile Asp Ala Ile Leu
                        280 285
Glu Ile Gly Ala Asp Arg Ile Leu Phe Xaa Thr Asp
        290 295 300
Trp Pro Phe Glu Asn Ile Asp His Ala Xaa Xaa Trp
                                305 310
Phe Xaa Xaa Xaa Ser Ile Ala Glu Ala Asp Arg Xaa
                315 320
Lys Ile Gly Arg Thr Asn Ala Xaa Xaa Leu Phe Lys
325
Leu Asp Xaa Xaa
```

wherein
Xaa at position 5 is Lys or Leu; Xaa at position 16 is Glu or Ala; Xaa at position 19 is Gln or Asn; Xaa at position 21 is Ser or Ala; Xaa at position 23 is Gly or Asp; Xaa at position 27 is Gly or Ser; Xaa at position 28 is Asp, Cys or Glu; Xaa at position 30 is Trp or Leu; Xaa at position 38 is Leu or Met; Xaa at position 40 is Ile or Met; Xaa at position 43 is Thr, Glu or Gin; Xaa at position 46 is Lys, Asn or Arg; Xaa at position 47 is Leu or Glu; Xaa at position 50 is Ala, Lys or Arg; Xaa at position 52 is Gly, Glu or Gin; Xaa at position 54 is Glu or Gly; Xaa at position 57 is Ile or Val; Xaa at position 61 is Asn or Ala; Xaa at position 63 is Pro or Val; Xaa at position 64 is Ala or Gly; Xaa at position 67 is Ala, Gly or Ser; Xaa at position 69 is Pro, Gly or Val; Xaa at position 72 is Arg or Val; Xaa at position 73 is Lys, Glu or Gln; Xaa at position 77 is Ile or Leu; Xaa at position 79 is Arg or Lys; Xaa at position 84 is Val, Phe or Met; Xaa at position 89 is Cys or Val; Xaa at position 94 is Asp or Gly; Xaa at position 104 is Leu or Met; Xaa at position 107 is Pro or Val; Xaa at position 108 is Asp or Glu; Xaa at position 111 is Thr or Ser; Xaa at position 112 is Glu or Ser; Xaa at position 117 is Cys or Thr; Xaa at position 119 is Asn, Ala or Arg; Xaa at position 120 is Asp or Thr; Xaa at position 127 is Leu or Met; Xaa at position 133 is Gln or Val; Xaa at position 153 is Gly or Lys; Xaa at position 174 is Ser or Ala; Xaa at position 212 is Arg or Gly; Xaa at position 214 is Asn or Gln; Xaa at position 220 is Met or Leu; Xaa at position 229 is Trp or Tyr; Xaa at position 235 is Val or Ile; Xaa at position 236 is Ala or Gly; Xaa at position 239 is Lys, Glu or His; Xaa at position 240 is Leu, Ala or Glu; Xaa at position 243 is Arg or Asp; Xaa at position 245 is Pro or Ala; Xaa at position 255 is Asn or Leu; Xaa at position 259 is His or Trp; Xaa at position 286 is Ser or Ala; Xaa at position 298 is Ser, Ala or Thr; Xaa at position 299 is Asp or Ala; Xaa at position 302 is Asn or Ala; Xaa at position 303 is Ala or Glu; Xaa at position 304 is Thr or Ala; Xaa at position 312 is Val or Leu; Xaa at position 320 is Arg or Leu; Xaa at position 321 is Arg or Asn; Xaa at position 327 is Gly, Leu or Val; Xaa at position 328 is Ala, Asp, Arg, Ser or Thr; wherein one or more amino acid(s) designated by Xaa in SEQ ID NO: 1042 is an amino acid different from the corresponding amino acid of SEQ ID NO: 109; and wherein the polypeptide having dicamba decarboxylase activity has increased dicamba decarboxylase activity compared to the polypeptide of SEQ ID NO: 109.

[0045] In other embodiments, a fragment of a dicamba decarboxylase polynucleotide that encodes a biologically active portion of a dicamba decarboxylase polypeptide will encode a region of the polypeptide that is sufficient to form the dicamba decarboxylase catalytic residue geometry as set forth in Table 3 or having a substantially similar catalytic residue geometry.

[0046] Thus, a fragment of a dicamba decarboxylase polynucleotide encodes a biologically active portion of a dicamba decarboxylase polypeptide. A biologically active portion of a dicamba decarboxylase polypeptide can be prepared by isolating a portion of one of the polynucleotides encoding a dicamba decarboxylase polypeptide, expressing the encoded portion of the dicamba decarboxylase polypeptides (e.g., by recombinant expression in vitro), and assaying for dicamba decarboxylase activity. Polynucleotides that are fragments of a dicamba decarboxylase nucleotide sequence comprise at least 16, 20, 50, 75, 100, 150, 200, 250, 300, 350, 400, 450, 500, 550, 600, 650, 700, 800, 900, 1,000, 1,100, 1,200, 1,300, or 1,400 contiguous nucleotides, or up to the number of nucleotides present in a full-length polynucleotide encoding a dicamba decarboxylase polypeptide disclosed herein.

[0047] ii. Active Variants of Dicamba Decarboxylase Sequences

[0048] “Variant” protein is intended to mean a protein derived from the protein by deletion (i.e., truncation at the 5′ and/or 3′ end) and/or a deletion or addition of one or more amino acids at one or more internal sites in the native protein and/or substitution of one or more amino acids at one or more sites in the native protein. Variant proteins encompassed are biologically active, that is they continue to possess the desired biological activity, that is, dicamba decarboxylases activity.

[0049] “Variants” is intended to mean substantially similar sequences. For polynucleotides, a variant comprises a polynucleotide having a deletion (i.e., truncations) at the 5′ and/or 3′ end and/or a deletion and/or addition of one or more nucleotides at one or more internal sites within the native polynucleotide and/or a substitution of one or more nucleotides at one or more sites in the native polynucleotide. For polynucleotides, conservative variants include those sequences that, because of the degeneracy of the genetic code, encode the amino acid sequence of one of the dicamba decarboxylase polypeptides. Naturally occurring variants such as these can be identified with the use of well-known molecular biology techniques, as, for example, with polymerase chain reaction (PCR) and hybridization techniques, and sequencing techniques as outlined below. Variant polynucleotides also include synthetically derived polynucleotides, such as those generated, for example, by using site-directed mutagenesis or gene synthesis but which still encode a dicamba decarboxylase polypeptide or through computation modeling.

[0050] In other embodiments, biologically active variants of a dicamba decarboxylase polypeptide (and the polynucleotide encoding the same) will have a percent identity across their full length of at least 40%, 45%, 50%, 55%, 60%, 65%, 70%, 75%, 80%, 81%, 82%, 83%, 84%, 85%, 86%, 87%, 88%, 89%, 90%, 91%, 92%, 93%, 94%, 95%, 96%, 97%, 98%, 99%, or 100% sequence identity to the polypeptide of any one of SEQ ID NO: 1, 2, 3, 4, 5, 6, 7, 8, 9, 10, 11, 12, 13, 14, 15, 16, 17, 18, 19, 20, 21, 22, 23, 24, 25, 26, 27, 28, 29, 30, 31, 32, 33, 34, 35, 36, 37, 38, 39, 40, 41, 42, 43, 44, 45, 46, 47, 48, 49, 50, 51, 52, 53, 54, 55, 56, 57, 58, 59, 60, 61, 62, 63, 64, 65, 66, 67, 68, 69, 70, 71, 72, 73, 74, 75, 76, 77, 78, 79, 80, 81, 82, 83, 84, 85, 86, 87, 88, 89, 90, 91, 92, 93, 94, 95, 96, 97, 98, 99, 100, 101, 102, 103, 104, 105, 106, 107, 108, 109, 110, 111, 112, 113, 114, 115, 116, 117, 118, 119, 120, 121, 122, 123, 124, 125, 126, 127, 128 or 129 as determined by sequence alignment programs and parameters described elsewhere herein.

[0051] In other embodiments, biologically active variants of a dicamba decarboxylase polypeptide (and the polynucleotide encoding the same) will have a percent identity across their full length of at least 40%, 45%, 50%, 55%, 60%, 65%, 70%, 75%, 80%, 81%, 82%, 83%, 84%, 85%, 86%, 87%, 88%, 89%, 90%, 91%, 92%, 93%, 94%, 95%, 96%, 97%, 98%, 99%, or 100% sequence identity to the polypeptide of any one of SEQ ID NO: 1, 2, 3, 4, 5, 6, 7, 8, 9, 10, 11, 12, 13, 14, 15, 16, 17, 18, 19, 20, 21, 22, 23, 24, 25, 26, 27, 28, 29, 30, 31, 32, 33, 34, 35, 36, 37, 38, 39, 40, 41, 42, 43, 44, 45, 46, 47, 48, 49, 50, 51, 52, 53, 54, 55, 56, 57, 58, 59, 60, 61, 62, 63, 64, 65, 66, 67, 68, 69, 70, 71, 72, 73, 74, 75, 76, 77, 78, 79, 80, 81, 82, 83, 84, 85, 86, 87, 88, 89, 90, 91, 92, 93, 94, 95, 96, 97, 98, 99, 100, 101, 102, 103, 104, 105, 106, 107, 108, 109, 110, 111, 112, 113, 114, 115, 116, 117, 118, 119, 120, 121, 122, 123, 124, 125, 126, 127, 128, 129, 130, 131, 132, 133, 134, 135, 136, 137, 138, 139, 140, 141, 142, 143, 144, 145, 146, 147, 148, 149, 150, 151, 152, 153, 154, 155, 156, 157, 158, 159, 160, 161, 162, 163, 164, 165, 166, 167, 168, 169, 170, 171, 172, 173, 174, 175, 176, 177, 178, 179, 180, 181, 182, 183, 184, 185, 186, 187, 188, 189, 190, 191, 192, 193, 194, 195, 196, 197, 198, 199, 200, 201, 202, 203, 204, 205, 206, 207, 208, 209, 210, 211, 212, 213, 214, 215, 216, 217, 218, 219, 220, 221, 222, 223, 224, 225, 226, 227, 228, 229, 230, 231, 232, 233, 234, 235, 236, 237, 238, 239, 240, 241, 242, 243, 244, 245, 246, 247, 248, 249, 250, 251, 252, 253, 254, 255, 256, 257, 258, 259, 260, 261, 262, 263, 264, 265, 266, 267, 268, 269, 270, 271, 272, 273, 274, 275, 276, 277, 278, 279, 280, 281, 282, 283, 284, 285, 286, 287, 288, 289, 290, 291, 292, 293, 294, 295, 296, 297, 298, 299, 300, 301, 302, 303, 304, 305, 306, 307, 308, 309, 310, 311, 312, 313, 314, 315, 316, 317, 318, 319, 320, 321, 322, 323, 324, 325, 326, 327, 328, 329, 330, 331, 332, 333, 334, 335, 336, 337, 338, 339, 340, 341, 342, 343, 344, 345, 346, 347, 348, 349, 350, 351, 352, 353, 354, 355, 356, 357, 358, 359, 360, 361, 362, 363, 364, 365, 366, 367, 368, 369, 370, 371, 372, 373, 374, 375, 376, 377, 378, 379, 380, 381, 382, 383, 384, 385, 386, 387, 388, 389, 390, 391, 392, 393, 394, 395, 396, 397, 398, 399, 400, 401, 402, 403, 404, 405, 406, 407, 408, 409, 410, 411, 412, 413, 414, 415, 416, 417, 418, 419, 420, 421, 422, 423, 424, 425, 426, 427, 428, 429, 430, 431, 432, 433, 434, 435, 436, 437, 438, 439, 440, 441, 442, 443, 444, 445, 446, 447, 448, 449, 450, 451, 452, 453, 454, 455, 456, 457, 458, 459, 460, 461, 462, 463, 464, 465, 466, 467, 468, 469, 470, 471, 472, 473, 474, 475, 476, 477, 478, 479, 480, 481, 482, 483, 484, 485, 486, 487, 488, 489, 490, 491, 492, 493, 494, 495, 496, 497, 498, 499, 500, 501, 502, 503, 504, 505, 506, 507, 508, 509, 510, 511, 512, 513, 514, 515, 516, 517, 518, 519, 520, 521, 522, 523, 524, 525, 526, 527, 528, 529, 530, 531, 532, 533, 534, 535, 536, 537, 538, 539, 540, 541, 542, 543, 544, 545, 546, 547, 548, 549, 550, 551, 552, 553, 554, 555, 556, 557, 558, 559, 560, 561, 562, 563, 564, 565, 566, 567, 568, 569, 570, 571, 572, 573, 574, 575, 576, 577, 578, 579, 580, 581, 582, 583, 584, 585, 586, 587, 588, 589, 590, 591, 592, 593, 594, 595, 596, 597, 598, 599, 600, 601, 602, 603, 604, 605, 606, 607, 608, 609, 610, 611, 612, 613, 614, 615, 616, 617, 618, 619, 620, 621, 622, 623, 624, 625, 626, 627, 628, 629, 630, 631, 632, 633, 634, 635, 636, 637, 638, 639, 640, 641, 642, 643, 644, 645, 646, 647, 648, 649, 650, 651, 652, 653, 654, 655, 656, 657, 658, 659, 660, 661, 662, 663, 664, 665, 666, 667, 668, 669, 670, 671, 672, 673, 674, 675, 676, 677, 678, 679, 680, 681, 682, 683, 684, 685, 686, 687, 688, 689, 690, 691, 692, 693, 694, 695, 696, 697, 698, 699, 700, 701, 702, 703, 704, 705, 706, 707, 708, 709, 710, 711, 712, 713, 714, 715, 716, 717, 718, 719, 720, 721, 722, 723, 724, 725, 726, 727, 728, 729, 730, 731, 732, 733, 734, 735, 736, 737, 738, 739, 740, 741, 742, 743, 744, 745, 746, 747, 748, 749, 750, 751, 752, 753, 754, 755, 756, 757, 758, 759, 760, 761, 762, 763, 764, 765, 766, 767, 768, 769, 770, 771, 772, 773, 774, 775, 776, 777, 778, 779, 780, 781, 782, 783, 784, 785, 786, 787, 788, 789, 790, 791, 792, 793, 794, 795, 796, 797, 798, 799, 800, 801, 802, 803, 804, 805, 806, 807, 808, 809, 810, 811, 812, 813, 814, 815, 816, 817, 818, 819, 820, 821, 822, 823, 824, 825, 826, 827, 828, 829, 830, 831, 832, 833, 834, 835, 836, 837, 838, 839, 840, 841, 842, 843, 844, 845, 846, 847, 848, 849, 850, 851, 852, 853, 854, 855, 856, 857, 858, 859, 860, 861, 862, 863, 864, 865, 866, 867, 868, 869, 870, 871, 872, 873, 874, 875, 876, 877, 878, 879, 880, 881, 882, 883, 884, 885, 886, 887, 888, 889, 890, 891, 892, 893, 894, 895, 896, 897, 898, 899, 900, 901, 902, 903, 904, 905, 906, 907, 908, 909, 910, 911, 912, 913, 914, 915, 916, 917, 918, 919, 920, 921, 922, 923, 924, 925, 926, 927, 928, 929, 930, 931, 932, 933, 934, 935, 936, 937, 938, 939, 940, 941, 942, 943, 944, 945, 946, 947, 948, 949, 950, 951, 952, 953, 954, 955, 956, 957, 958, 959, 960, 961, 962, 963, 964, 965, 966, 967, 968, 969, 970, 971, 972, 973, 974, 975, 976, 977, 978, 979, 980, 981, 982, 983, 984, 985, 986, 987, 988, 989, 990, 991, 992, 993, 994, 995, 996, 997, 998, 999, 1000, 1001, 1002, 1003, 1004, 1005, 1006, 1007, 1008, 1009, 1010, 1011, 1012, 1013, 1014, 1015, 1016, 1017, 1018, 1019, 1020, 1021, 1022, 1023, 1024, 1025, 1026, 1027, 1028, 1029, 1030, 1031, 1032, 1033, 1034, 1035, 1036, 1037, 1038, 1039, 1040, 1041, and 1042, as determined by sequence alignment programs and parameters described elsewhere herein.

[0052] In other embodiments, biologically active variants of a dicamba decarboxylase polypeptide (and the polynucleotide encoding the same) will have a percent identity across their full length of at least 40%, 45%, 50%, 55%, 60%, 65%, 70%, 75%, 80%, 81%, 82%, 83%, 84%, 85%, 86%, 87%, 88%, 89%, 90%, 91%, 92%, 93%, 94%, 95%, 96%, 97%, 98%, 99%, or 100% sequence identity to the polypeptide comprising:

```
(SEQ ID NO: 1041)
                                5 10
Met Ala Xaa Gly Lys Val Xaa Leu Glu Glu His Xaa
                15 20
Ala Ile Xaa Xaa Thr Leu Xaa Xaa Xaa Ala Xaa Phe
25 30 35
Val Pro Xaa Xaa Tyr Xaa Lys Xaa Leu Xaa His Arg
                        40 45
Leu Xaa Asp Xaa Gln Xaa Xaa Arg Leu Xaa Xaa Met
        50 55 60
Asp Xaa His Xaa Ile Xaa Xaa Met Xaa Leu Ser Leu
                                65 70
Xaa Ala Xaa Xaa Xaa Gln Xaa Xaa Xaa Xaa Arg Xaa
                75 80
Xaa Ala Xaa Xaa Xaa Ala Xaa Arg Xaa Asn Asp Xaa
85 90 95
Xaa Ala Glu Xaa Xaa Ala Xaa Xaa Xaa Xaa Arg Phe
                        100 105
Xaa Ala Phe Xaa Xaa Xaa Pro Xaa Xaa Asp Xaa Xaa
        110 115 120
Xaa Ala Xaa Xaa Glu Leu Gln Arg Xaa Val Xaa Xaa
                                125 130
Leu Gly Xaa Val Gly Ala Xaa Val Asn Gly Phe Ser
                135 140
Xaa Glu Gly Asp Xaa Xaa Thr Pro Leu Tyr Tyr Asp
145 150 155
Leu Pro Xaa Tyr Arg Pro Phe Trp Xaa Glu Val Glu
                        160 165
Lys Leu Asp Val Pro Phe Tyr Leu His Pro Xaa Asn
        170 175 180
Pro Leu Pro Gln Asp Xaa Arg Ile Tyr Xaa Gly His
                                185 190
Pro Trp Leu Leu Gly Pro Thr Trp Ala Phe Ala Gln
                195 200
Glu Thr Xaa Val His Ala Leu Arg Leu Met Ala Ser
205 210 215
Gly Leu Phe Asp Glu His Pro Xaa Leu Xaa Ile Ile
                        220 225
Leu Gly His Xaa Gly Glu Gly Leu Pro Tyr Met Xaa
        230 235 240
Xaa Arg Ile Asp His Arg Xaa Xaa Xaa Xaa Xaa Xaa
                                245 250
Pro Pro Xaa Tyr Xaa Ala Lys Xaa Xaa Phe Xaa Asp
                255 260
Tyr Phe Xaa Glu Asn Phe Xaa Xaa Thr Thr Ser Gly
265 270 275
Asn Phe Arg Thr Gln Thr Leu Ile Asp Ala Ile Leu
                        280 285
Glu Xaa Gly Ala Asp Arg Ile Leu Phe Ser Thr Asp
        290 295 300
Trp Pro Phe Glu Asn Ile Asp His Ala Xaa Xaa Trp
                                305 310
Phe Xaa Xaa Xaa Ser Ile Ala Glu Ala Asp Arg Xaa
                315 320
Lys Ile Gly Xaa Thr Asn Ala Xaa Xaa Leu Phe Lys
325
Leu Asp Xaa Xaa,
```

wherein

[0053] Xaa at position 3 is Gln, Gly, Met or Pro; Xaa at position 7 is Ala or Cys; Xaa at position 12 is Phe, Met, Val or Trp; Xaa at position 15 is Pro or Thr; Xaa at position 16 is Glu or Ala; Xaa at position 19 is Gln, Glu or Asn; Xaa at position 20 is Asp, Cys, Phe, Met or Trp; Xaa at position 21 is Ser, Ala, Gly or Val; Xaa at position 23 is Gly or Asp; Xaa at position 27 is Gly, Ala, Asp, Glu, Pro, Arg, Ser, Thr or Tyr; Xaa at position 28 is Asp, Cys, Glu, Phe or Gly; Xaa at position 30 is Trp, Leu or Val; Xaa at position 32 is Glu or Val; Xaa at position 34 is Gln, Ala or Trp; Xaa at position 38 is Leu, Ile, Met, Arg, Thr or Val; Xaa at position 40 is Ile, Met, Ser or Val; Xaa at position 42 is Asp, Ala, Gly, Lys, Met, Ser or Thr; Xaa at position 43 is Thr, Cys, Asp, Glu, Gly, Met, Gln, Arg or Tyr; Xaa at position 46 is Lys, Gly, Asn or Arg; Xaa at position 47 is Leu, Cys, Glu, Lys or Ser; Xaa at position 50 is Ala, Lys, Arg, Ser, Thr or Val; Xaa at position 52 is Gly, Glu, Leu, Asn or Gln; Xaa at position 54 is Glu or Gly; Xaa at position 55 is Thr or Leu; Xaa at position 57 is Ile, Ala or Val; Xaa at position 61 is Asn, Ala, Gly, Leu or Ser; Xaa at position 63 is Pro or Val; Xaa at position 64 is Ala, Gly, His or Ser; Xaa at position 65 is Val or Cys; Xaa at position 67 is Ala or Ser; Xaa at position 68 is Ile or Gln; Xaa at position 69 is Pro, Gly, Arg, Ser or Val; Xaa at position 70 is Asp or His; Xaa at position 72 is Arg, Lys or Val; Xaa at position 73 is Lys, Glu, Gln or Arg; Xaa at position 75 is Ile or Arg; Xaa at position 76 is Glu or Gly; Xaa at position 77 is Ile, Met, Arg, Ser or Val; Xaa at position 79 is Arg or Gln; Xaa at position 81 is Ala or Ser; Xaa at position 84 is Val, Cys, Phe or Met; Xaa at position 85 is Leu or Ala; Xaa at position 88 is Glu or Lys; Xaa at position 89 is Cys, Ile or Val; Xaa at position 91 is Lys or Arg; Xaa at position 92 is Arg or Lys; Xaa at position 93 is Pro, Ala or Arg; Xaa at position 94 is Asp, Cys, Gly, Gln or Ser; Xaa at position 97 is Leu, Lys or Arg; Xaa at position 100 is Ala, Gly or Ser; Xaa at position 101 is Ala or Gly; Xaa at position 102 is Leu or Val; Xaa at position 104 is Leu or Met; Xaa at position 105 is Gln or Gly; Xaa at position 107 is Pro or Val; Xaa at position 108 is Asp or Glu; Xaa at position 109 is Ala, Gly, Met or Val; Xaa at position 111 is Thr, Ala, Cys, Gly, Ser or Val; Xaa at position 112 is Glu, Gly, Arg or Ser; Xaa at position 117 is Cys, Ala or Thr; Xaa at position 119 is Asn, Ala, Cys, Arg or Ser; Xaa at position 120 is Asp or Thr; Xaa at position 123 is Phe or Leu; Xaa at position 127 is Leu or Met; Xaa at position 133 is Gln or Val; Xaa at position 137 is Gly, Ala or Glu; Xaa at position 138 is Gln or Gly; Xaa at position 147 is Gln or Ile; Xaa at position 153 is Gly or Lys; Xaa at position 167 is Arg or Glu; Xaa at position 174 is Ser or Ala; Xaa at position 178 is Asp or Glu; Xaa at position 195 is Ala or Gly; Xaa at position 212 is Arg, Gly or Gln; Xaa at position 214 is Asn or Gln; Xaa at position 220 is Met or Leu; Xaa at position 228 is Met or Leu; Xaa at position 229 is Trp or Tyr; Xaa at position 235 is Val or Ile; Xaa at position 236 is Ala, Gly, Gln or Trp; Xaa at position 237 is Trp or Leu; Xaa at position 238 is Val, Gly or Pro; Xaa at position 239 is Lys, Ala, Asp, Glu, Gly or His; Xaa at position 240 is Leu, Ala, Asp, Glu, Gly or Val; Xaa at position 243 is Arg, Ala, Asp, Lys, Ser or Val; Xaa at position 245 is Pro or Ala; Xaa at position 248 is Arg or Lys; Xaa at position 249 is Arg or Pro; Xaa at position 251 is Met or Val; Xaa at position 255 is Asn, Ala, Leu, Met, Gln, Arg or Ser; Xaa at position 259 is His or Trp; Xaa at position 260 is Ile or Leu; Xaa at position 278 is Ile or Leu; Xaa at position 298 is Ser, Ala or Thr; Xaa at position 299 is Asp or Ala; Xaa at position 302 is Asn or Ala; Xaa at position 303 is Ala, Cys, Asp, Glu or Ser; Xaa at position 304 is Thr or Val; Xaa at position 312 is Val or Leu; Xaa at position 316 is Arg or Ser; Xaa at position 320 is Arg or Leu; Xaa at position 321 is Arg or Asn; Xaa at position 327 is Gly, Leu, Gln or Val; Xaa at position 328 is Ala, Cys, Asp, Arg, Ser, Thr or Val; wherein one or more amino acid(s) designated by Xaa in SEQ ID NO: 1041 is an amino acid different from the corresponding amino acid of SEQ ID NO: 109; and wherein the polypeptide having dicamba decarboxylase activity has increased dicamba decarboxylase activity compared to the polypeptide of SEQ ID NO: 109.

[0054] In other embodiments, biologically active variants of a dicamba decarboxylase polypeptide (and the polynucleotide encoding the same) will have a percent identity across their full length of at least 40%, 45%, 50%, 55%, 60%, 65%, 70%, 75%, 80%, 81%, 82%, 83%, 84%, 85%, 86%, 87%, 88%, 89%, 90%, 91%, 92%, 93%, 94%, 95%, 96%, 97%, 98%, 99%, or 100% sequence identity to the polypeptide comprising:

```
(SEQ ID NO: 1042)
                                5 10
Met Ala Gln Gly Xaa Val Ala Leu Glu Glu His Phe
                15 20
Ala Ile Pro Xaa Thr Leu Xaa Asp Xaa Ala Xaa Phe
25 30 35
Val Pro Xaa Xaa Tyr Xaa Lys Glu Leu Gln His Arg
                        40 45
Leu Xaa Asp Xaa Gln Asp Xaa Arg Leu Xaa Xaa Met
        50 55 60
Asp Xaa His Xaa Ile Xaa Thr Met Xaa Leu Ser Leu
                                65 70
Xaa Ala Xaa Xaa Val Gln Xaa Ile Xaa Asp Arg Xaa
                75 80
Xaa Ala Ile Glu Xaa Ala Xaa Arg Ala Asn Asp Xaa
85 90 95
Leu Ala Glu Glu Xaa Ala Lys Arg Pro Xaa Arg Phe
                        100 105
Leu Ala Phe Ala Ala Leu Pro Xaa Gln Asp Xaa Xaa
        110 115 120
Ala Ala Xaa Xaa Glu Leu Gln Arg Xaa Val Xaa Xaa
                                125 130
Leu Gly Phe Val Gly Ala Xaa Val Asn Gly Phe Ser
                135 140
Xaa Glu Gly Asp Gly Gln Thr Pro Leu Tyr Tyr Asp
145 150 155
Leu Pro Gln Tyr Arg Pro Phe Trp Xaa Glu Val Glu
                        160 165
Lys Leu Asp Val Pro Phe Tyr Leu His Pro Arg Asn
        170 175 180
Pro Leu Pro Gln Asp Xaa Arg Ile Tyr Asp Gly His
                                185 190
Pro Trp Leu Leu Gly Pro Thr Trp Ala Phe Ala Gln
                195 200
Glu Thr Ala Val His Ala Leu Arg Leu Met Ala Ser
205 210 215
Gly Leu Phe Asp Glu His Pro Xaa Leu Xaa Ile Ile
                        220 225
Leu Gly His Xaa Gly Glu Gly Leu Pro Tyr Met Met
        230 235 240
Xaa Arg Ile Asp His Arg Xaa Xaa Trp Val Xaa Xaa
                                245 250
Pro Pro Xaa Tyr Xaa Ala Lys Arg Arg Phe Met Asp
                255 260
Tyr Phe Xaa Glu Asn Phe Xaa Ile Thr Thr Ser Gly
265 270 275
Asn Phe Arg Thr Gln Thr Leu Ile Asp Ala Ile Leu
                        280 285
Glu Ile Gly Ala Asp Arg Ile Leu Phe Xaa Thr Asp
        290 295 300
Trp Pro Phe Glu Asn Ile Asp His Ala Xaa Xaa Trp
                                305 310
Phe Xaa Xaa Xaa Ser Ile Ala Glu Ala Asp Arg Xaa
                315 320
Lys Ile Gly Arg Thr Asn Ala Xaa Xaa Leu Phe Lys
325
Leu Asp Xaa Xaa
```

wherein
Xaa at position 5 is Lys or Leu; Xaa at position 16 is Glu or Ala; Xaa at position 19 is Gln or Asn; Xaa at position 21 is Ser or Ala; Xaa at position 23 is Gly or Asp; Xaa at position 27 is Gly or Ser; Xaa at position 28 is Asp, Cys or Glu; Xaa at position 30 is Trp or Leu; Xaa at position 38 is Leu or Met; Xaa at position 40 is Ile or Met; Xaa at position 43 is Thr, Glu or Gln; Xaa at position 46 is Lys, Asn or Arg; Xaa at position 47 is Leu or Glu; Xaa at position 50 is Ala, Lys or Arg; Xaa at position 52 is Gly, Glu or Gln; Xaa at position 54 is Glu or Gly; Xaa at position 57 is Ile or Val; Xaa at position 61 is Asn or Ala; Xaa at position 63 is Pro or Val; Xaa at position 64 is Ala or Gly; Xaa at position 67 is Ala, Gly or Ser; Xaa at position 69 is Pro, Gly or Val; Xaa at position 72 is Arg or Val; Xaa at position 73 is Lys, Glu or Gln; Xaa at position 77 is Ile or Leu; Xaa at position 79 is Arg or Lys; Xaa at position 84 is Val, Phe or Met; Xaa at position 89 is Cys or Val; Xaa at position 94 is Asp or Gly; Xaa at position 104 is Leu or Met; Xaa at position 107 is Pro or Val; Xaa at position 108 is Asp or Glu; Xaa at position 111 is Thr or Ser; Xaa at position 112 is Glu or Ser; Xaa at position 117 is Cys or Thr; Xaa at position 119 is Asn, Ala or Arg; Xaa at position 120 is Asp or Thr; Xaa at position 127 is Leu or Met; Xaa at position 133 is Gln or Val; Xaa at position 153 is Gly or Lys; Xaa at position 174 is Ser or Ala; Xaa at position 212 is Arg or Gly; Xaa at position 214 is Asn or Gln; Xaa at position 220 is Met or Leu; Xaa at position 229 is Trp or Tyr; Xaa at position 235 is Val or Ile; Xaa at position 236 is Ala or Gly; Xaa at position 239 is Lys, Glu or His; Xaa at position 240 is Leu, Ala or Glu; Xaa at position 243 is Arg or Asp; Xaa at position 245 is Pro or Ala; Xaa at position 255 is Asn or Leu; Xaa at position 259 is His or Trp; Xaa at position 286 is Ser or Ala; Xaa at position 298 is Ser, Ala or Thr; Xaa at position 299 is Asp or Ala; Xaa at position 302 is Asn or Ala; Xaa at position 303 is Ala or Glu; Xaa at position 304 is Thr or Ala; Xaa at position 312 is Val or Leu; Xaa at position 320 is Arg or Leu; Xaa at position 321 is Arg or Asn; Xaa at position 327 is Gly, Leu or Val; Xaa at position 328 is Ala, Asp, Arg, Ser or Thr; wherein one or more amino acid(s) designated by Xaa in SEQ ID NO: 1042 is an amino acid different from the corresponding amino acid of SEQ ID NO: 109; and wherein the polypeptide having dicamba decarboxylase activity has increased dicamba decarboxylase activity compared to the polypeptide of SEQ ID NO: 109.

[0055] In other embodiments, biologically active variants of a dicamba decarboxylase polypeptide (and the polynucleotide encoding the same) will have at least a similarity score of or about 400, 420, 450, 480, 500, 520, 540, 548, 580, 590, 600, 620, 650, 675, 700, 710, 720, 721, 722, 723, 724, 725, 726, 728, 729, 730, 731, 732, 733, 734, 735, 736, 738, 739, 740, 741, 742, 743, 744, 745, 746, 747, 748, 749, 750, 751, 752, 753, 754, 755, 756, 757, 758, 759, 760, 761, 762, 763, 764, 765, 766, 767, 768, 769, 770, 771, 772, 773, 774, 775, 776, 777, 778, 779, 780, 781, 782, 783, 784, 785, 786, 787, 788, 789, 790, 791, 792, 793, 794, 795, 796, 797, 798, 799, 800, 801, 802, 803, 804, 805, 806, 807, 808, 809, 810, 811, 812, 813, 814, 815, 816, 817, 818, 819, 820, 821, 822, 823, 824, 825, 826, 828, 829, 830, 831, 832, 833, 834, 835, 836, 838, 839, 840, 841, 842, 843, 844, 845, 846, 847, 848, 849, 850, 851, 852, 853, 854, 855, 856, 857, 858, 859, 860, 861, 862, 863, 864, 865, 866, 867, 868, 869, 870, 871, 872, 873, 874, 875, 876, 877, 878, 879, 880, 881, 882, 883, 884, 885, 886, 887, 888, 889, 890, 900, 920, 940, 960, or greater to any one of SEQ ID NO: 1, 2, 3, 4, 5, 6, 7, 8, 9, 10, 11, 12, 13, 14, 15, 16, 17, 18, 19, 20, 21, 22, 23, 24, 25, 26, 27, 28, 29, 30, 31, 32, 33, 34, 35, 36, 37, 38, 39, 40, 41, 42, 43, 44, 45, 46, 47, 48, 49, 50, 51, 52, 53, 54, 55, 56, 57, 58, 59, 60, 61, 62, 63, 64, 65, 66, 67, 68, 69, 70, 71, 72, 73, 74, 75, 76, 77, 78, 79, 80, 81, 82, 83, 84, 85, 86, 87, 88, 89, 90, 91, 92, 93, 94, 95, 96, 97, 98, 99, 100, 101, 102, 103, 104, 105, 106, 107, 108, 109, 110, 111, 112, 113, 114, 115, 116, 117, 118, 119, 120, 121, 122, 123, 124, 125, 126, 127, 128 or 129 as determined by sequence alignment programs and parameters described elsewhere herein.

[0056] The dicamba decarboxylase polypeptides and the active variants and fragments thereof may be altered in various ways including amino acid substitutions, deletions, truncations, and insertions and through rational design modeling as discussed elsewhere herein. Methods for such manipulations are generally known in the art. For example, amino acid sequence variants and fragments of the dicamba decarboxylase polypeptides can be prepared by mutations in the DNA. Methods for mutagenesis and polynucleotide alterations are well known in the art. See, for example, Kunkel (1985) Proc. Natl. Acad. Sci. USA 82:488-492; Kunkel et al. (1987) Methods in Enzymol. 154:367-382; U.S. Pat. No. 4,873,192; Walker and Gaastra, eds. (1983) Techniques in Molecular Biology (MacMillan Publishing Company, New York) and the references cited therein. Guidance as to appropriate amino acid substitutions that do not affect biological activity of the protein of interest may be found in the model of Dayhoff et al. (1978) Atlas of Protein Sequence and Structure (Natl. Biomed. Res. Found, Washington, D.C.), herein incorporated by reference in their entirety. Conservative substitutions, such as exchanging one amino acid with another having similar properties, may be optimal.

[0057] Obviously, the mutations that will be made in the DNA encoding the variant must not place the sequence out of reading frame and optimally will not create complementary regions that could produce secondary mRNA structure. See, EP Patent Application Publication No. 75,444.

[0058] Non-limiting examples of dicamba decarboxylases and active fragments and variants thereof are provided herein and can include dicamba decarboxylases comprising an active site having a catalytic residue geometry as set forth in Table 3 or having a substantially similar catalytic residue geometry and further comprises an amino acid sequence having at least 40%, 75% 50%, 55%, 60%, 65%, 70%, 75%, 80%, 81%, 82%, 83%, 84%, 85%, 86%, 87%, 88%, 89%, 90%, 91%, 92%, 93%, 94%, 95%, 96%, 97%, 98%, 99%, or 100% percent identity to any one of SEQ ID NOS: 1, 2, 3, 4, 5, 6, 7, 8, 9, 10, 11, 12, 13, 14, 15, 16, 17, 18, 19, 20, 21, 22, 23, 24, 25, 26, 27, 28, 29, 30, 31, 32, 33, 34, 35, 36, 37, 38, 39, 40, 41, 42, 43, 44, 45, 46, 47, 48, 49, 50, 51, 52, 53, 54, 55, 56, 57, 58, 59, 60, 61, 62, 63, 64, 65, 66, 67, 68, 69, 70, 71, 72, 73, 74, 75, 76, 77, 78, 79, 80, 81, 82, 83, 84, 85, 86, 87, 88, 89, 90, 91, 92, 93, 94, 95, 96, 97, 98, 99, 100, 101, 102, 103, 104, 105, 106, 107, 108, 109, 110, 111, 112, 113, 114, 115, 116, 117, 118, 119, 120, 121, 122, 123, 124, 125, 126, 127, 128 or 129, wherein the polypeptide has dicamba decarboxylation activity.

[0059] Non-limiting examples of dicamba decarboxylases and active fragments and variants thereof are provided herein and can include dicamba decarboxylases comprising an active site having a catalytic residue geometry as set forth in Table 3 or having a substantially similar catalytic residue geometry and further comprises an amino acid sequence having at least 40%, 75% 50%, 55%, 60%, 65%, 70%, 75%, 80%, 81%, 82%, 83%, 84%, 85%, 86%, 87%, 88%, 89%, 90%, 91%, 92%, 93%, 94%, 95%, 96%, 97%, 98%, 99%, or 100% percent identity to any one of SEQ ID NOS: 1, 2, 3, 4, 5, 6, 7, 8, 9, 10, 11, 12, 13, 14, 15, 16, 17, 18, 19, 20, 21, 22, 23, 24, 25, 26, 27, 28, 29, 30, 31, 32, 33, 34, 35, 36, 37, 38, 39, 40, 41, 42, 43, 44, 45, 46, 47, 48, 49, 50, 51, 52, 53, 54, 55, 56, 57, 58, 59, 60, 61, 62, 63, 64, 65, 66, 67, 68, 69, 70, 71, 72, 73, 74, 75, 76, 77, 78, 79, 80, 81, 82, 83, 84, 85, 86, 87, 88, 89, 90, 91, 92, 93, 94, 95, 96, 97, 98, 99, 100, 101, 102, 103, 104, 105, 106, 107, 108, 109, 110, 111, 112, 113, 114, 115, 116, 117, 118, 119, 120, 121, 122, 123, 124, 125, 126, 127, 128, 129, 130, 131, 132, 133, 134, 135, 136, 137, 138, 139, 140, 141, 142, 143, 144, 145, 146, 147, 148, 149, 150, 151, 152, 153, 154, 155, 156, 157, 158, 159, 160, 161, 162, 163, 164, 165, 166, 167, 168, 169, 170, 171, 172, 173, 174, 175, 176, 177, 178, 179, 180, 181, 182, 183, 184, 185, 186, 187, 188, 189, 190, 191, 192, 193, 194, 195, 196, 197, 198, 199, 200, 201, 202, 203, 204, 205, 206, 207, 208, 209, 210, 211, 212, 213, 214, 215, 216, 217, 218, 219, 220, 221, 222, 223, 224, 225, 226, 227, 228, 229, 230, 231, 232, 233, 234, 235, 236, 237, 238, 239, 240, 241, 242, 243, 244, 245, 246, 247, 248, 249, 250, 251, 252, 253, 254, 255, 256, 257, 258, 259, 260, 261, 262, 263, 264, 265, 266, 267, 268, 269, 270, 271, 272, 273, 274, 275, 276, 277, 278, 279, 280, 281, 282, 283, 284, 285, 286, 287, 288, 289, 290, 291, 292, 293, 294, 295, 296, 297, 298, 299, 300, 301, 302, 303, 304, 305, 306, 307, 308, 309, 310, 311, 312, 313, 314, 315, 316, 317, 318, 319, 320, 321, 322, 323, 324, 325, 326, 327, 328, 329, 330, 331, 332, 333, 334, 335, 336, 337, 338, 339, 340, 341, 342, 343, 344, 345, 346, 347, 348, 349, 350, 351, 352, 353, 354, 355, 356, 357, 358, 359, 360, 361, 362, 363, 364, 365, 366, 367, 368, 369, 370, 371, 372, 373, 374, 375, 376, 377, 378, 379, 380, 381, 382, 383, 384, 385, 386, 387, 388, 389, 390, 391, 392, 393, 394, 395, 396, 397, 398, 399, 400, 401, 402, 403, 404, 405, 406, 407, 408, 409, 410, 411, 412, 413, 414, 415, 416, 417, 418, 419, 420, 421, 422, 423, 424, 425, 426, 427, 428, 429, 430, 431, 432, 433, 434, 435, 436, 437, 438, 439, 440, 441, 442, 443, 444, 445, 446, 447, 448, 449, 450, 451, 452, 453, 454, 455, 456, 457, 458, 459, 460, 461, 462, 463, 464, 465, 466, 467, 468, 469, 470, 471, 472, 473, 474, 475, 476, 477, 478, 479, 480, 481, 482, 483, 484, 485, 486, 487, 488, 489, 490, 491, 492, 493, 494, 495, 496, 497, 498, 499, 500, 501, 502, 503, 504, 505, 506, 507, 508, 509, 510, 511, 512, 513, 514, 515, 516, 517, 518, 519, 520, 521, 522, 523, 524, 525, 526, 527, 528, 529, 530, 531, 532, 533, 534, 535, 536, 537, 538, 539, 540, 541, 542, 543, 544, 545, 546, 547, 548, 549, 550, 551, 552, 553, 554, 555, 556, 557, 558, 559, 560, 561, 562, 563, 564, 565, 566, 567, 568, 569, 570, 571, 572, 573, 574, 575, 576, 577, 578, 579, 580, 581, 582, 583, 584, 585, 586, 587, 588, 589, 590, 591, 592, 593, 594, 595, 596, 597, 598, 599, 600, 601, 602, 603, 604, 605, 606, 607, 608, 609, 610, 611, 612, 613, 614, 615, 616, 617, 618, 619, 620, 621, 622, 623, 624, 625, 626, 627, 628, 629, 630, 631, 632, 633, 634, 635, 636, 637, 638, 639, 640, 641, 642, 643, 644, 645, 646, 647, 648, 649, 650, 651, 652, 653, 654, 655, 656, 657, 658, 659, 660, 661, 662, 663, 664, 665, 666, 667, 668, 669, 670, 671, 672, 673, 674, 675, 676, 677, 678, 679, 680, 681, 682, 683, 684, 685, 686, 687, 688, 689, 690, 691, 692, 693, 694, 695, 696, 697, 698, 699, 700, 701, 702, 703, 704, 705, 706, 707, 708, 709, 710, 711, 712, 713, 714, 715, 716, 717, 718, 719, 720, 721, 722, 723, 724, 725, 726, 727, 728, 729, 730, 731, 732, 733, 734, 735, 736, 737, 738, 739, 740, 741, 742, 743, 744, 745, 746, 747, 748, 749, 750, 751, 752, 753, 754, 755, 756, 757, 758, 759, 760, 761, 762, 763, 764, 765, 766, 767, 768, 769, 770, 771, 772, 773, 774, 775, 776, 777, 778, 779, 780, 781, 782, 783, 784, 785, 786, 787, 788, 789, 790, 791, 792, 793, 794, 795, 796, 797, 798, 799, 800, 801, 802, 803, 804, 805, 806, 807, 808, 809, 810, 811, 812, 813, 814, 815, 816, 817, 818, 819, 820, 821, 822, 823, 824, 825, 826, 827, 828, 829, 830, 831, 832, 833, 834, 835, 836, 837, 838, 839, 840, 841, 842, 843, 844, 845, 846, 847, 848, 849, 850, 851, 852, 853, 854, 855, 856, 857, 858, 859, 860, 861, 862, 863, 864, 865, 866, 867, 868, 869, 870, 871, 872, 873, 874, 875, 876, 877, 878, 879, 880, 881, 882, 883, 884, 885, 886, 887, 888, 889, 890, 891, 892, 893, 894, 895, 896, 897, 898, 899, 900, 901, 902, 903, 904, 905, 906, 907, 908, 909, 910, 911, 912, 913, 914, 915, 916, 917, 918, 919, 920, 921, 922, 923, 924, 925, 926, 927, 928, 929, 930, 931, 932, 933, 934, 935, 936, 937, 938, 939, 940, 941, 942, 943, 944, 945, 946, 947, 948, 949, 950, 951, 952, 953, 954, 955, 956, 957, 958, 959, 960, 961, 962, 963, 964, 965, 966, 967, 968, 969, 970, 971, 972, 973, 974, 975, 976, 977, 978, 979, 980, 981, 982, 983, 984, 985, 986, 987, 988, 989, 990, 991, 992, 993, 994, 995, 996, 997, 998, 999, 1000, 1001, 1002, 1003, 1004, 1005, 1006, 1007, 1008, 1009, 1010, 1011, 1012, 1013, 1014, 1015, 1016, 1017, 1018, 1019, 1020, 1021, 1022, 1023, 1024, 1025, 1026, 1027, 1028, 1029, 1030, 1031, 1032, 1033, 1034, 1035, 1036, 1037, 1038, 1039, 1040, 1041, and 1042, wherein the polypeptide has dicamba decarboxylation activity.

[0060] In other embodiments, the dicamba decarboxylases and active fragments and variants thereof are provided herein and can include a dicamba decarboxylase comprises an active site having a catalytic residue geometry as set forth in Table 3 or having a substantially similar catalytic residue geometry and further comprises an amino acid sequence having a similarity score of at least 400, 420, 450, 480, 500, 520, 540, 548, 580, 590, 600, 620, 650, 675, 700, 710, 720, 721, 722, 723, 724, 725, 726, 728, 729, 730, 731, 732, 733, 734, 735, 736, 738, 739, 740, 741, 742, 743, 744, 745, 746, 747, 748, 749, 750, 751, 752, 753, 754, 755, 756, 757, 758, 759, 760, 761, 762, 763, 764, 765, 766, 767, 768, 769, 770, 771, 772, 773, 774, 775, 776, 777, 778, 779, 780, 781, 782, 783, 784, 785, 786, 787, 788, 789, 790, 791, 792, 793, 794, 795, 796, 797, 798, 799, 800, 801, 802, 803, 804, 805, 806, 807, 808, 809, 810, 811, 812, 813, 814, 815, 816, 817, 818, 819, 820, 821, 822, 823, 824, 825, 826, 828, 829, 830, 831, 832, 833, 834, 835, 836, 838, 839, 840, 841, 842, 843, 844, 845, 846, 847, 848, 849, 850, 851, 852, 853, 854, 855, 856, 857, 858, 859, 860, 861, 862, 863, 864, 865, 866, 867, 868, 869, 870, 871, 872, 873, 874, 875, 876, 877, 878, 879, 880, 881, 882, 883, 884, 885, 886, 887, 888, 889, 890, 900, 920, 940, 960 or greater to any one of SEQ ID NOS: 1, 2, 3, 4, 5, 6, 7, 8, 9, 10, 11, 12, 13, 14, 15, 16, 17, 18, 19, 20, 21, 22, 23, 24, 25, 26, 27, 28, 29, 30, 31, 32, 33, 34, 35, 36, 37, 38, 39, 40, 41, 42, 43, 44, 45, 46, 47, 48, 49, 50, 51, 52, 53, 54, 55, 56, 57, 58, 59, 60, 61, 62, 63, 64, 65, 66, 67, 68, 69, 70, 71, 72, 73, 74, 75, 76, 77, 78, 79, 80, 81, 82, 83, 84, 85, 86, 87, 88, 89, 90, 91, 92, 93, 94, 95, 96, 97, 98, 99, 100, 101, 102, 103, 104, 105, 106, 107, 108, 109, 110, 111, 112, 113, 114, 115, 116, 117, 118, 119, 120, 121, 122, 123, 124, 125, 126, 127, 128 or 129, wherein the polypeptide has dicamba decarboxylation activity.

[0061] In other embodiments, the dicamba decarboxylases and active fragments and variants thereof are provided herein and can include a dicamba decarboxylase comprises an active site having a catalytic residue geometry as set forth in Table 3 or having a substantially similar catalytic residue geometry and further comprises an amino acid sequence having a similarity score of at least 400, 420, 450, 480, 500, 520, 540, 548, 580, 590, 600, 620, 650, 675, 700, 710, 720, 721, 722, 723, 724, 725, 726, 728, 729, 730, 731, 732, 733, 734, 735, 736, 738, 739, 740, 741, 742, 743, 744, 745, 746, 747, 748, 749, 750, 751, 752, 753, 754, 755, 756, 757, 758, 759, 760, 761, 762, 763, 764, 765, 766, 767, 768, 769, 770, 771, 772, 773, 774, 775, 776, 777, 778, 779, 780, 781, 782, 783, 784, 785, 786, 787, 788, 789, 790, 791, 792, 793, 794, 795, 796, 797, 798, 799, 800, 801, 802, 803, 804, 805, 806, 807, 808, 809, 810, 811, 812, 813, 814, 815, 816, 817, 818, 819, 820, 821, 822, 823, 824, 825, 826, 828, 829, 830, 831, 832, 833, 834, 835, 836, 838, 839, 840, 841, 842, 843, 844, 845, 846, 847, 848, 849, 850, 851, 852, 853, 854, 855, 856, 857, 858, 859, 860, 861, 862, 863, 864, 865, 866, 867, 868, 869, 870, 871, 872, 873, 874, 875, 876, 877, 878, 879, 880, 881, 882, 883, 884, 885, 886, 887, 888, 889, 890, 900, 920, 940, 960 or greater to any one of SEQ ID NOS: 1, 2, 3, 4, 5, 6, 7, 8, 9, 10, 11, 12, 13, 14, 15, 16, 17, 18, 19, 20, 21, 22, 23, 24, 25, 26, 27, 28, 29, 30, 31, 32, 33, 34, 35, 36, 37, 38, 39, 40, 41, 42, 43, 44, 45, 46, 47, 48, 49, 50, 51, 52, 53, 54, 55, 56, 57, 58, 59, 60, 61, 62, 63, 64, 65, 66, 67, 68, 69, 70, 71, 72, 73, 74, 75, 76, 77, 78, 79, 80, 81, 82, 83, 84, 85, 86, 87, 88, 89, 90, 91, 92, 93, 94, 95, 96, 97, 98, 99, 100, 101, 102, 103, 104, 105, 106, 107, 108, 109, 110, 111, 112, 113, 114, 115, 116, 117, 118, 119, 120, 121, 122, 123, 124, 125, 126, 127, 128, 129, 130, 131, 132, 133, 134, 135, 136, 137, 138, 139, 140, 141, 142, 143, 144, 145, 146, 147, 148, 149, 150, 151, 152, 153, 154, 155, 156, 157, 158, 159, 160, 161, 162, 163, 164, 165, 166, 167, 168, 169, 170, 171, 172, 173, 174, 175, 176, 177, 178, 179, 180, 181, 182, 183, 184, 185, 186, 187, 188, 189, 190, 191, 192, 193, 194, 195, 196, 197, 198, 199, 200, 201, 202, 203, 204, 205, 206, 207, 208, 209, 210, 211, 212, 213, 214, 215, 216, 217, 218, 219, 220, 221, 222, 223, 224, 225, 226, 227, 228, 229, 230, 231, 232, 233, 234, 235, 236, 237, 238, 239, 240, 241, 242, 243, 244, 245, 246, 247, 248, 249, 250, 251, 252, 253, 254, 255, 256, 257, 258, 259, 260, 261, 262, 263, 264, 265, 266, 267, 268, 269, 270, 271, 272, 273, 274, 275, 276, 277, 278, 279, 280, 281, 282, 283, 284, 285, 286, 287, 288, 289, 290, 291, 292, 293, 294, 295, 296, 297, 298, 299, 300, 301, 302, 303, 304, 305, 306, 307, 308, 309, 310, 311, 312, 313, 314, 315, 316, 317, 318, 319, 320, 321, 322, 323, 324, 325, 326, 327, 328, 329, 330, 331, 332, 333, 334, 335, 336, 337, 338, 339, 340, 341, 342, 343, 344, 345, 346, 347, 348, 349, 350, 351, 352, 353, 354, 355, 356, 357, 358, 359, 360, 361, 362, 363, 364, 365, 366, 367, 368, 369, 370, 371, 372, 373, 374, 375, 376, 377, 378, 379, 380, 381, 382, 383, 384, 385, 386, 387, 388, 389, 390, 391, 392, 393, 394, 395, 396, 397, 398, 399, 400, 401, 402, 403, 404, 405, 406, 407, 408, 409, 410, 411, 412, 413, 414, 415, 416, 417, 418, 419, 420, 421, 422, 423, 424, 425, 426, 427, 428, 429, 430, 431, 432, 433, 434, 435, 436, 437, 438, 439, 440, 441, 442, 443, 444, 445, 446, 447, 448, 449, 450, 451, 452, 453, 454, 455, 456, 457, 458, 459, 460, 461, 462, 463, 464, 465, 466, 467, 468, 469, 470, 471, 472, 473, 474, 475, 476, 477, 478, 479, 480, 481, 482, 483, 484, 485, 486, 487, 488, 489, 490, 491, 492, 493, 494, 495, 496, 497, 498, 499, 500, 501, 502, 503, 504, 505, 506, 507, 508, 509, 510, 511, 512, 513, 514, 515, 516, 517, 518, 519, 520, 521, 522, 523, 524, 525, 526, 527, 528, 529, 530, 531, 532, 533, 534, 535, 536, 537, 538, 539, 540, 541, 542, 543, 544, 545, 546, 547, 548, 549, 550, 551, 552, 553, 554, 555, 556, 557, 558, 559, 560, 561, 562, 563, 564, 565, 566, 567, 568, 569, 570, 571, 572, 573, 574, 575, 576, 577, 578, 579, 580, 581, 582, 583, 584, 585, 586, 587, 588, 589, 590, 591, 592, 593, 594, 595, 596, 597, 598, 599, 600, 601, 602, 603, 604, 605, 606, 607, 608, 609, 610, 611, 612, 613, 614, 615, 616, 617, 618, 619, 620, 621, 622, 623, 624, 625, 626, 627, 628, 629, 630, 631, 632, 633, 634, 635, 636, 637, 638, 639, 640, 641, 642, 643, 644, 645, 646, 647, 648, 649, 650, 651, 652, 653, 654, 655, 656, 657, 658, 659, 660, 661, 662, 663, 664, 665, 666, 667, 668, 669, 670, 671, 672, 673, 674, 675, 676, 677, 678, 679, 680, 681, 682, 683, 684, 685, 686, 687, 688, 689, 690, 691, 692, 693, 694, 695, 696, 697, 698, 699, 700, 701, 702, 703, 704, 705, 706, 707, 708, 709, 710, 711, 712, 713, 714, 715, 716, 717, 718, 719, 720, 721, 722, 723, 724, 725, 726, 727, 728, 729, 730, 731, 732, 733, 734, 735, 736, 737, 738, 739, 740, 741, 742, 743, 744, 745, 746, 747, 748, 749, 750, 751, 752, 753, 754, 755, 756, 757, 758, 759, 760, 761, 762, 763, 764, 765, 766, 767, 768, 769, 770, 771, 772, 773, 774, 775, 776, 777, 778, 779, 780, 781, 782, 783, 784, 785, 786, 787, 788, 789, 790, 791, 792, 793, 794, 795, 796, 797, 798, 799, 800, 801, 802, 803, 804, 805, 806, 807, 808, 809, 810, 811, 812, 813, 814, 815, 816, 817, 818, 819, 820, 821, 822, 823, 824, 825, 826, 827, 828, 829, 830, 831, 832, 833, 834, 835, 836, 837, 838, 839, 840, 841, 842, 843, 844, 845, 846, 847, 848, 849, 850, 851, 852, 853, 854, 855, 856, 857, 858, 859, 860, 861, 862, 863, 864, 865, 866, 867, 868, 869, 870, 871, 872, 873, 874, 875, 876, 877, 878, 879, 880, 881, 882, 883, 884, 885, 886, 887, 888, 889, 890, 891, 892, 893, 894, 895, 896, 897, 898, 899, 900, 901, 902, 903, 904, 905, 906, 907, 908, 909, 910, 911, 912, 913, 914, 915, 916, 917, 918, 919, 920, 921, 922, 923, 924, 925, 926, 927, 928, 929, 930, 931, 932, 933, 934, 935, 936, 937, 938, 939, 940, 941, 942, 943, 944, 945, 946, 947, 948, 949, 950, 951, 952, 953, 954, 955, 956, 957, 958, 959, 960, 961, 962, 963, 964, 965, 966, 967, 968, 969, 970, 971, 972, 973, 974, 975, 976, 977, 978, 979, 980, 981, 982, 983, 984, 985, 986, 987, 988, 989, 990, 991, 992, 993, 994, 995, 996, 997, 998, 999, 1000, 1001, 1002, 1003, 1004, 1005, 1006, 1007, 1008, 1009, 1010, 1011, 1012, 1013, 1014, 1015, 1016, 1017, 1018, 1019, 1020, 1021, 1022, 1023, 1024, 1025, 1026, 1027, 1028, 1029, 1030, 1031, 1032, 1033, 1034, 1035, 1036, 1037, 1038, 1039, 1040, 1041, and 1042, wherein the polypeptide has dicamba decarboxylation activity.

[0062] In other embodiments, the dicamba decarboxylase comprises an active site having a catalytic residue geometry as set forth in Table 3or having a substantially similar catalytic residue geometry and further comprises (a) an amino acid sequence having a similarity score of at least 548 for any one of SEQ ID NO: 51, 89, 79, 81, 95, or 100, wherein said similarity score is generated using the BLAST alignment program, with the BLOSUM62 substitution matrix, a gap existence penalty of 11, and a gap extension penalty of 1; (b) an amino acid sequence having a similarity score of at least 400, 450, 480, 500, 520, 548, 580, 600, 620, 650, 670, 690, 710, 720, 730, 750, 780, 800, 820, 840, 860, 880, 900, 920, 940, 960, or higher for any one of SEQ ID NO: 51, 89, 79, 81, 95, or 100, wherein said similarity score is generated using the BLAST alignment program, with the BLOSUM62 substitution matrix, a gap existence penalty of 11, and a gap extension penalty of 1; (d) an amino acid sequence having at least 50%, 55%, 60%, 65%, 70%, 75%, 80%, 81%, 82%, 83%, 84%, 85%, 86%, 87%, 88%, 89%, 90%, 95%, 96%, 97%, 98%, 99%, or 100% sequence identity to any one of SEQ ID NOS: 1, 2, 4, 5, 16, 19, 21, 22, 26, 28, 30, 21, 32, 33, 34, 35, 36, 41, 43, 44, 46, 47, 48, 49, 50, 51, 52, 53, 54, 55, 56, 57, 58, 79, 81, 87, 88, 89, 91, 108, 109, 111, 112, 113, 114, 115, 116, 117, 118, 119, 120, 121, 122, 123, 124, 125, 126, 127, 128, or 129; (e) an amino acid sequence having at least 40%, 45%, 50%, 55%, 60%, 65%, 70%, 75%, 80%, 81%, 82%, 83%, 84%, 85%, 86%, 87%, 88%, 89%, 90%, 95%, 96%, 97%, 98%, 99% or 100% sequence identity to any one of SEQ ID NOS: 46, 89, 19, 79, 81, 95, or 100; (f) an amino acid sequence having at least 40%, 45%, 50%, 55%, 60%, 65%, 70%, 75%, 80%, 81%, 82%, 83%, 84%, 85%, 86%, 87%, 88%, 89%, 90%, 95%, 96%, 97%, 98%, 99% or 100% sequence identity to any one of SEQ ID NOS: 117, 118, or 119; (g) an amino acid sequence having at least 40%, 45%, 50%, 55%, 60%, 65%, 70%, 75%, 80%, 81%, 82%, 83%, 84%, 85%, 86%, 87%, 88%, 89%, 90%, 95%, 96%, 97%, 98%, 99% or 100% sequence identity to any one of SEQ ID NOS: 120, 121, or 122; (h) an amino acid sequence having at least 40%, 45%, 50%, 55%, 60%, 65%, 70%, 75%, 80%, 81%, 82%, 83%, 84%, 85%, 86%, 87%, 88%, 89%, 90%, 95% 96%, 97%, 98%, 99% or 100% sequence identity to any one of SEQ ID NOS:109, 110, 111, 112, 113, 114, 116 or 115; (i) an amino acid sequence having at least 40%, 45%, 50%, 55%, 60%, 65%, 70%, 75%, 80%, 81%, 82%, 83%, 84%, 85%, 86%, 87%, 88%, 89%, 90%, 95%, 96%, 97%, 98%, 99% or 100% sequence identity to SEQ ID NO: 116; (j) and/or an amino acid sequence having at least 40%, 45%, 50%, 55%, 60%, 65%, 70%, 75%, 80%, 81%, 82%, 83%, 84%, 85%, 86%, 87%, 88%, 89%, 90%, 95%, 96%, 97%, 98%, 99% or 100% sequence identity to SEQ ID NO: 1, 2, 4, 5, 16, 19, 21, 22, 26, 28, 30, 21, 32, 33, 34, 35, 36, 41, 43, 44, 46, 47, 48, 49, 50, 51, 52, 53, 54, 55, 56, 57, 58, 79, 81, 87, 88, 89, 91, 108, 109, 111, 112, 113, 114, 115, 116, 117, 118, 119, 120, 121, 122, 123, 124, 125, 126, 127, 128, or 109, wherein (i) the amino acid residue in the encoded polypeptide that corresponds to amino acid position 27 of SEQ ID NO: 109 comprises alanine, serine, or threonine; (ii) the amino acid residue in the encoded polypeptide that corresponds to amino acid position 38 of SEQ ID NO: 109 comprises isoleucine; (iii) the amino acid residue in the encoded polypeptide that corresponds to amino acid position 42 of SEQ ID NO: 109 comprises alanine, methionine, or serine; (iv) the amino acid residue in the encoded polypeptide that corresponds to amino acid position 52 of SEQ ID NO: 109 comprises glutamic acid; (v) the amino acid residue in the encoded polypeptide that corresponds to amino acid position 61 of SEQ ID NO: 109 comprises alanine or serine; (vi) the amino acid residue in the encoded polypeptide that corresponds to amino acid position 64 of SEQ ID NO: 109 comprises glycine, or serine; (vii) the amino acid residue in the encoded polypeptide that corresponds to amino acid position 127 of SEQ ID NO: 109 comprises methionine; (iix) the amino acid residue in the encoded polypeptide that corresponds to amino acid position 238 of SEQ ID NO: 109 comprises glycine; (ix) the amino acid residue in the encoded polypeptide that corresponds to amino acid position 240 of SEQ ID NO: 109 comprises alanine, aspartic acid, or glutamic acid; (x) the amino acid residue in the encoded polypeptide that corresponds to amino acid position 298 of SEQ ID NO: 109 comprises alanine or threonine; (xi) the amino acid residue in the encoded polypeptide that corresponds to amino acid position 299 of SEQ ID NO: 109 comprises alanine; (xii) the amino acid residue in the encoded polypeptide that corresponds to amino acid position 303 of SEQ ID NO: 109 comprises cysteine, glutamic acid, or serine; (xiii) the amino acid residue in the encoded polypeptide that corresponds to amino acid position 327 of SEQ ID NO: 109 comprises leucine, glutamine, or valine; (ixv) the amino acid residue in the encoded polypeptide that corresponds to amino acid position 328 of SEQ ID NO: 109 comprises aspartic acid, arginine, or serine; and/or (xv) the amino acid residue in the encoded protein that corresponds to the amino acid position of SEQ ID NO: 109 as set forth in Table 7 and corresponds to the specific amino acid substitution also set forth in Table 7 or any combination of residues denoted in Table 7.

[0063] It is recognized that dicamba decarboxylases useful in the methods and compositions provided herein need not comprise catalytic residue geometry as set forth in Table 3, so long as the polypeptides retains dicamba decarboxylase activity. In such embodiments, the polypeptide having dicamba decarboxylase activity can comprise (a) an amino acid sequence having a similarity score of at least 548 for any one of SEQ ID NO: 51, 89, 79, 81, 95, or 100, wherein said similarity score is generated using the BLAST alignment program, with the BLOSUM62 substitution matrix, a gap existence penalty of 11, and a gap extension penalty of 1; (b) an amino acid sequence having a similarity score of at least 400, 450, 480, 500, 520, 548, 580, 600, 620, 650, 670, 690, 710, 720, 730, 750, 780, 800, 820, 840, 860, 880, 900, 920, 940, 960, or higher for any one of SEQ ID NO: 51, 89, 79, 81, 95, or 100, wherein said similarity score is generated using the BLAST alignment program, with the BLOSUM62 substitution matrix, a gap existence penalty of 11, and a gap extension penalty of 1; (d) an amino acid sequence having at least 50%, 55%, 60%, 65%, 70%, 75%, 80%, 81%, 82%, 83%, 84%, 85%, 86%, 87%, 88%, 89%, 90%, 95%, 96%, 97%, 98%, 99%, or 100% sequence identity to any one of SEQ ID NOS: 1, 2, 4, 5, 16, 19, 21, 22, 26, 28, 30, 21, 32, 33, 34, 35, 36, 41, 43, 44, 46, 47, 48, 49, 50, 51, 52, 53, 54, 55, 56, 57, 58, 79, 81, 87, 88, 89, 91, 108, 109, 111, 112, 113, 114, 115, 116, 117, 118, 119, 120, 121, 122, 123, 124, 125, 126, 127, 128, or 129; (e) an amino acid sequence having at least 40%, 45%, 50%, 55%, 60%, 65%, 70%, 75%, 80%, 81%, 82%, 83%, 84%, 85%, 86%, 87%, 88%, 89%, 90%, 95%, 96%, 97%, 98%, 99% or 100% sequence identity to any one of SEQ ID NOS: 46, 89, 19, 79, 81, 95, or 100; (f) an amino acid sequence having at least 40%, 45%, 50%, 55%, 60%, 65%, 70%, 75%, 80%, 81%, 82%, 83%, 84%, 85%, 86%, 87%, 88%, 89%, 90%, 95%, 96%, 97%, 98%, 99% or 100% sequence identity to any one of SEQ ID NOS: 117, 118, or 119; (g) an amino acid sequence having at least 40%, 45%, 50%, 55%, 60%, 65%, 70%, 75%, 80%, 81%, 82%, 83%, 84%, 85%, 86%, 87%, 88%, 89%, 90%, 95%, 96%, 97%, 98%, 99% or 100% sequence identity to any one of SEQ ID NOS: 120, 121, or 122; (h) an amino acid sequence having at least 40%, 45%, 50%, 55%, 60%, 65%, 70%, 75%, 80%, 81%, 82%, 83%, 84%, 85%, 86%, 87%, 88%, 89%, 90%, 95% 96%, 97%, 98%, 99% or 100% sequence identity to any one of SEQ ID NOS:109, 110, 111, 112, 113, 114, 116 or 115; (i) an amino acid sequence having at least 40%, 45%, 50%, 55%, 60%, 65%, 70%, 75%, 80%, 81%, 82%, 83%, 84%, 85%, 86%, 87%, 88%, 89%, 90%, 95%, 96%, 97%, 98%, 99% or 100% sequence identity to SEQ ID NO: 116; (j) and/or an amino acid sequence having at least 40%, 45%, 50%, 55%, 60%, 65%, 70%, 75%, 80%, 81%, 82%, 83%, 84%, 85%, 86%, 87%, 88%, 89%, 90%, 95%, 96%, 97%, 98%, 99% or 100% sequence identity to SEQ ID NO: 1, 2, 4, 5, 16, 19, 21, 22, 26, 28, 30, 21, 32, 33, 34, 35, 36, 41, 43, 44, 46, 47, 48, 49, 50, 51, 52, 53, 54, 55, 56, 57, 58, 79, 81, 87, 88, 89, 91, 108, 109, 111, 112, 113, 114, 115, 116, 117, 118, 119, 120, 121, 122, 123, 124, 125, 126, 127, 128, or 129, wherein (i) the amino acid residue in the encoded polypeptide that corresponds to amino acid position 27 of SEQ ID NO: 109 comprises alanine, serine, or threonine; (ii) the amino acid residue in the encoded polypeptide that corresponds to amino acid position 38 of SEQ ID NO: 109 comprises isoleucine; (iii) the amino acid residue in the encoded polypeptide that corresponds to amino acid position 42 of SEQ ID NO: 109 comprises alanine, methionine, or serine; (iv) the amino acid residue in the encoded polypeptide that corresponds to amino acid position 52 of SEQ ID NO: 109 comprises glutamic acid; (v) the amino acid residue in the encoded polypeptide that corresponds to amino acid position 61 of SEQ ID NO: 109 comprises alanine or serine; (vi) the amino acid residue in the encoded polypeptide that corresponds to amino acid position 64 of SEQ ID NO: 109 comprises glycine, or serine; (vii) the amino acid residue in the encoded polypeptide that corresponds to amino acid position 127 of SEQ ID NO: 109 comprises methionine; (iix) the amino acid residue in the encoded polypeptide that corresponds to amino acid position 238 of SEQ ID NO: 109 comprises glycine; (ix) the amino acid residue in the encoded polypeptide that corresponds to amino acid position 240 of SEQ ID NO: 109 comprises alanine, aspartic acid, or glutamic acid; (x) the amino acid residue in the encoded polypeptide that corresponds to amino acid position 298 of SEQ ID NO: 109 comprises alanine or threonine; (xi) the amino acid residue in the encoded polypeptide that corresponds to amino acid position 299 of SEQ ID NO: 109 comprises alanine; (xii) the amino acid residue in the encoded polypeptide that corresponds to amino acid position 303 of SEQ ID NO: 109 comprises cysteine, glutamic acid, or serine; (xiii) the amino acid residue in the encoded polypeptide that corresponds to amino acid position 327 of SEQ ID NO: 109 comprises leucine, glutamine, or valine; (ixv) the amino acid residue in the encoded polypeptide that corresponds to amino acid position 328 of SEQ ID NO: 109 comprises aspartic acid, arginine, or serine; and/or (xv) the amino acid residue in the encoded protein that corresponds to the amino acid position of SEQ ID NO: 109 as set forth in Table 7 and corresponds to the specific amino acid substitution also set forth in Table 7 or any combination of residues denoted in Table 7.

[0064] As used herein, an “isolated” or “purified” polynucleotide or polypeptide, or biologically active portion thereof, is substantially or essentially free from components that normally accompany or interact with the polynucleotide or polypeptide as found in its naturally occurring environment. Thus, an isolated or purified polynucleotide or polypeptide is substantially free of other cellular material or culture medium when produced by recombinant techniques, or substantially free of chemical precursors or other chemicals when chemically synthesized. Optimally, an “isolated” polynucleotide is free of sequences (optimally protein encoding sequences) that naturally flank the polynucleotide (i.e., sequences located at the 5′ and 3′ ends of the polynucleotide) in the genomic DNA of the organism from which the polynucleotide is derived. For example, in various embodiments, the isolated polynucleotide can contain less than about 5 kb, 4 kb, 3 kb, 2 kb, 1 kb, 0.5 kb, or 0.1 kb of nucleotide sequence that naturally flank the polynucleotide in genomic DNA of the cell from which the polynucleotide is derived. A polypeptide that is substantially free of cellular material includes preparations of polypeptides having less than about 30%, 20%, 10%, 5%, or 1% (by dry weight) of contaminating protein.

[0065] As used herein, polynucleotide or polypeptide is “recombinant” when it is artificial or engineered, or derived from an artificial or engineered protein or nucleic acid. For example, a polynucleotide that is inserted into a vector or any other heterologous location, e.g., in a genome of a recombinant organism, such that it is not associated with nucleotide sequences that normally flank the polynucleotide as it is found in nature is a recombinant polynucleotide. A polypeptide expressed in vitro or in vivo from a recombinant polynucleotide is an example of a recombinant polypeptide. Likewise, a polynucleotide sequence that does not appear in nature, for example, a variant of a naturally occurring gene is recombinant.

[0066] A “control” or “control plant” or “control plant cell” provides a reference point for measuring changes in phenotype of the subject plant or plant cell, and may be any suitable plant or plant cell. A control plant or plant cell may comprise, for example: (a) a wild-type or native plant or cell, i.e., of the same genotype as the starting material for the genetic alteration which resulted in the subject plant or cell; (b) a plant or plant cell of the same genotype as the starting material but which has been transformed with a null construct (i.e., with a construct which has no known effect on the trait of interest, such as a construct comprising a marker gene); (c) a plant or plant cell which is a non-transformed segregant among progeny of a subject plant or plant cell; (d) a plant or plant cell which is genetically identical to the subject plant or plant cell but which is not exposed to the same treatment (e.g., herbicide treatment) as the subject plant or plant cell; or (e) the subject plant or plant cell itself, under conditions in which the gene of interest is not expressed.

[0067] iii. Dicamba Decarboxylase Activity

[0068] Various assays can be used to measure dicamba decarboxylase activity. In one method, dicamba decarboxylase activity can be assayed by measuring CO₂ generated from enzyme reactions. See Example 1 which outlines in detail such assays. In other methods, dicamba decarboxylase activity can be assayed by measuring CO₂ product indirectly using a coupled enzyme assay which is also described in detail in Example 1. The overall catalytic efficiency of the enzyme can be expressed as k_{cat}/K_{M}. Alternatively, dicamba decarboxylase activity can be monitored by measuring decarboxylation products other than CO₂ using product detection methods. Each of the decarboxylation products of dicamba that can be assayed, including 2,5-dichloro anisole (2,5-dichloro phenol (the decarboxylated and demethylated product of dicamba) and 4-chloro-3-methoxy phenol (the decarboxylated and chloro hydrolyzed product) using the various methods as set forth in Example 1. In specific embodiments, the dicamba decarboxylase activity is assayed by expressing the sequence in a plant cell and detecting an increase tolerance of the plant cell to dicamba.

[0069] Thus, the various assays described herein can be used to determine kinetic parameters (i.e., K_{M}, k_{cat}, k_{cat}/K_{M}) for the dicamba decarboxylases. In general, a dicamba decarboxylase with a higher k_{cat} or k_{cat}/K_{M} is a more efficient catalyst than another dicamba decarboxylase with lower k_{cat} or k_{cat}/K_{M}. A dicamba decarboxylase with a lower K_{M} is a more efficient catalyst than another dicamba decarboxylase with a higher K_{M}. Thus, to determine whether one dicamba decarboxylase is more effective than another, one can compare kinetic parameters for the two enzymes. The relative importance of k_{cat}, k_{cat}/K_{M} and K_{M} will vary depending upon the context in which the dicamba decarboxylase will be expected to function, e.g., the anticipated effective concentration of dicamba relative to K_{M} for dicamba. Dicamba decarboxylase activity can also be characterized in terms of any of a number of functional characteristics, e.g., stability, susceptibility to inhibition or activation by other molecules, etc. Some dicamba decarboxylase polypeptides for use in decarboxylating dicamba have a k_{cat} of at least 0.01 min⁻¹, at least 0.1 min⁻¹, 1 min⁻¹, 10 min⁻¹, 100 min⁻¹, 1,000 min⁻¹, or 10,000 min⁻¹. Other dicamba decarboxylase polypeptides for use in conferring dicamba tolerance have a K_{M} no greater than 0.001 mM, 0.01 mM, 0.1 mM, 1 mM, 10 mM or 100 mM. Still other dicamba decarboxylase polypeptides for use in conferring dicamba tolerance have a k_{cat}/K_{M} of at least 0.0001 mM⁻¹ min⁻¹ or more, at least 0.001 mM⁻¹ min⁻¹, 0.01 mM⁻¹ min⁻¹, 0.1 mM⁻¹ min⁻¹, 1.0 mM⁻¹ min⁻¹, 10 mM⁻¹ min⁻¹, 100 mM⁻¹ min⁻¹, 1,000 mM⁻¹ min⁻¹, or 10,000 mM⁻¹ min⁻¹.

[0070] In specific embodiments, the dicamba decarboxylase polypeptide or active variant or fragment thereof has an activity that is at least equivalent to a native dicamba decarboxylase polypeptide or has an activity that is increased when compared to a native dicamba decarboxylase polypeptide. An “equivalent” dicamba decarboxylase activity refers to an activity level that is not statistically significantly different from the control as determined through any enzymatic kinetic parameter, including for example, via K_{M}, k_{cat}, or k_{cat}/K_{M}. An increased dicamba decarboxylase activity comprises any statistically significant increase in dicamba decarboxylase activity as determined through any enzymatic kinetic parameter, such as, for example, K_{M}, k_{cat}, or k_{cat}/K_{M}. In specific embodiments, an increase in activity comprises at least a 1.1, 1.2, 1.3, 1.4, 1.5, 1.6, 1.7, 1.8, 2, 3, 4, 5, 6, 7, 8, 9, or 10 fold or greater improvement in a given kinetic parameter when compared to a native sequence as set forth in SEQ ID NO:1-108. Methods to determine such kinetic parameters are known.

### III. Host Cells, Plants and Plant Parts

[0071] Host cells, plants, plant cells, plant parts, seeds, and grain having a heterologous copy of the dicamba decarboxylase sequences disclosed herein are provided. It is expected that those of skill in the art are knowledgeable in the numerous systems available for the introduction of a polypeptide or a nucleotide sequence disclosed herein into a host cell. No attempt to describe in detail the various methods known for providing sequences in prokaryotes or eukaryotes will be made.

[0072] By “host cell” is meant a cell which comprises a heterologous dicamba decarboxylase sequence. Host cells may be prokaryotic cells, such as E. coli, or eukaryotic cells such as yeast cells. Suitable host cells include the prokaryotes and the lower eukaryotes, such as fungi. Illustrative prokaryotes, both Gram-negative and Gram-positive, include Enterobacteriaceae, such as Escherichia, Erwinia, Shigella, Salmonella, and Proteus; Bacillaceae; Rhizobiceae, such as Rhizobium; Spirillaceae, such as photobacterium, Zymomonas, Serratia, Aeromonas, Vibrio, Desulfovibrio, Spirillum; Lactobacillaceae; Pseudomonadaceae, such as Pseudomonas and Acetobacter; Azotobacteraceae and Nitrobacteraceae. Among eukaryotes are fungi, such as Phycomycetes and Ascomycetes, which includes yeast, such as Pichia pastoris, Saccharomyces and Schizosaccharomyces; and Basidiomycetes yeast, such as Rhodotorula, Aureobasidium, Sporobolomyces, and the like. Host cells can also be monocotyledonous or dicotyledonous plant cells.

[0073] In specific embodiments, the host cells, plants and/or plant parts have stably incorporated at least one heterologous polynucleotide encoding a dicamba decarboxylase polypeptide or an active variant or fragment thereof. Thus, host cells, plants, plant cells, plant parts and seed are provided which comprise at least one heterologous polynucleotide encoding a dicamba decarboxylase polypeptide of any one of SEQ ID NOS: 1, 2, 3, 4, 5, 6, 7, 8, 9, 10, 11, 12, 13, 14, 15, 16, 17, 18, 19, 20, 21, 22, 23, 24, 25, 26, 27, 28, 29, 30, 31, 32, 33, 34, 35, 36, 37, 38, 39, 40, 41, 42, 43, 44, 45, 46, 47, 48, 49, 50, 51, 52, 53, 54, 55, 56, 57, 58, 59, 60, 61, 62, 63, 64, 65, 66, 67, 68, 69, 70, 71, 72, 73, 74, 75, 76, 77, 78, 79, 80, 81, 82, 83, 84, 85, 86, 87, 88, 89, 90, 91, 92, 93, 94, 95, 96, 97, 98, 99, 100, 101, 102, 103, 104, 105, 106, 107, 108, 109, 110, 111, 112, 113, 114, 115, 116, 117, 118, 119, 120, 121, 122, 123, 124, 125, 126, 127, 128 or 129 or active variant or fragments thereof. In other embodiments, the host cells, plants, plant cells, plant parts and seed are provided which comprise at least one heterologous polynucleotide encoding a dicamba decarboxylase polypeptide which comprises a catalytic residue geometry as set forth in Table 3 or a substantially similar geometry. Such sequences are discussed elsewhere herein.

[0074] In specific embodiments, host cells, plants, plant cells, plant parts and seed are provided which comprise at least one heterologous polynucleotide encoding a dicamba decarboxylase polypeptide of any one of SEQ ID NOS: 1, 2, 3, 4, 5, 6, 7, 8, 9, 10, 11, 12, 13, 14, 15, 16, 17, 18, 19, 20, 21, 22, 23, 24, 25, 26, 27, 28, 29, 30, 31, 32, 33, 34, 35, 36, 37, 38, 39, 40, 41, 42, 43, 44, 45, 46, 47, 48, 49, 50, 51, 52, 53, 54, 55, 56, 57, 58, 59, 60, 61, 62, 63, 64, 65, 66, 67, 68, 69, 70, 71, 72, 73, 74, 75, 76, 77, 78, 79, 80, 81, 82, 83, 84, 85, 86, 87, 88, 89, 90, 91, 92, 93, 94, 95, 96, 97, 98, 99, 100, 101, 102, 103, 104, 105, 106, 107, 108, 109, 110, 111, 112, 113, 114, 115, 116, 117, 118, 119, 120, 121, 122, 123, 124, 125, 126, 127, 128, 129, 130, 131, 132, 133, 134, 135, 136, 137, 138, 139, 140, 141, 142, 143, 144, 145, 146, 147, 148, 149, 150, 151, 152, 153, 154, 155, 156, 157, 158, 159, 160, 161, 162, 163, 164, 165, 166, 167, 168, 169, 170, 171, 172, 173, 174, 175, 176, 177, 178, 179, 180, 181, 182, 183, 184, 185, 186, 187, 188, 189, 190, 191, 192, 193, 194, 195, 196, 197, 198, 199, 200, 201, 202, 203, 204, 205, 206, 207, 208, 209, 210, 211, 212, 213, 214, 215, 216, 217, 218, 219, 220, 221, 222, 223, 224, 225, 226, 227, 228, 229, 230, 231, 232, 233, 234, 235, 236, 237, 238, 239, 240, 241, 242, 243, 244, 245, 246, 247, 248, 249, 250, 251, 252, 253, 254, 255, 256, 257, 258, 259, 260, 261, 262, 263, 264, 265, 266, 267, 268, 269, 270, 271, 272, 273, 274, 275, 276, 277, 278, 279, 280, 281, 282, 283, 284, 285, 286, 287, 288, 289, 290, 291, 292, 293, 294, 295, 296, 297, 298, 299, 300, 301, 302, 303, 304, 305, 306, 307, 308, 309, 310, 311, 312, 313, 314, 315, 316, 317, 318, 319, 320, 321, 322, 323, 324, 325, 326, 327, 328, 329, 330, 331, 332, 333, 334, 335, 336, 337, 338, 339, 340, 341, 342, 343, 344, 345, 346, 347, 348, 349, 350, 351, 352, 353, 354, 355, 356, 357, 358, 359, 360, 361, 362, 363, 364, 365, 366, 367, 368, 369, 370, 371, 372, 373, 374, 375, 376, 377, 378, 379, 380, 381, 382, 383, 384, 385, 386, 387, 388, 389, 390, 391, 392, 393, 394, 395, 396, 397, 398, 399, 400, 401, 402, 403, 404, 405, 406, 407, 408, 409, 410, 411, 412, 413, 414, 415, 416, 417, 418, 419, 420, 421, 422, 423, 424, 425, 426, 427, 428, 429, 430, 431, 432, 433, 434, 435, 436, 437, 438, 439, 440, 441, 442, 443, 444, 445, 446, 447, 448, 449, 450, 451, 452, 453, 454, 455, 456, 457, 458, 459, 460, 461, 462, 463, 464, 465, 466, 467, 468, 469, 470, 471, 472, 473, 474, 475, 476, 477, 478, 479, 480, 481, 482, 483, 484, 485, 486, 487, 488, 489, 490, 491, 492, 493, 494, 495, 496, 497, 498, 499, 500, 501, 502, 503, 504, 505, 506, 507, 508, 509, 510, 511, 512, 513, 514, 515, 516, 517, 518, 519, 520, 521, 522, 523, 524, 525, 526, 527, 528, 529, 530, 531, 532, 533, 534, 535, 536, 537, 538, 539, 540, 541, 542, 543, 544, 545, 546, 547, 548, 549, 550, 551, 552, 553, 554, 555, 556, 557, 558, 559, 560, 561, 562, 563, 564, 565, 566, 567, 568, 569, 570, 571, 572, 573, 574, 575, 576, 577, 578, 579, 580, 581, 582, 583, 584, 585, 586, 587, 588, 589, 590, 591, 592, 593, 594, 595, 596, 597, 598, 599, 600, 601, 602, 603, 604, 605, 606, 607, 608, 609, 610, 611, 612, 613, 614, 615, 616, 617, 618, 619, 620, 621, 622, 623, 624, 625, 626, 627, 628, 629, 630, 631, 632, 633, 634, 635, 636, 637, 638, 639, 640, 641, 642, 643, 644, 645, 646, 647, 648, 649, 650, 651, 652, 653, 654, 655, 656, 657, 658, 659, 660, 661, 662, 663, 664, 665, 666, 667, 668, 669, 670, 671, 672, 673, 674, 675, 676, 677, 678, 679, 680, 681, 682, 683, 684, 685, 686, 687, 688, 689, 690, 691, 692, 693, 694, 695, 696, 697, 698, 699, 700, 701, 702, 703, 704, 705, 706, 707, 708, 709, 710, 711, 712, 713, 714, 715, 716, 717, 718, 719, 720, 721, 722, 723, 724, 725, 726, 727, 728, 729, 730, 731, 732, 733, 734, 735, 736, 737, 738, 739, 740, 741, 742, 743, 744, 745, 746, 747, 748, 749, 750, 751, 752, 753, 754, 755, 756, 757, 758, 759, 760, 761, 762, 763, 764, 765, 766, 767, 768, 769, 770, 771, 772, 773, 774, 775, 776, 777, 778, 779, 780, 781, 782, 783, 784, 785, 786, 787, 788, 789, 790, 791, 792, 793, 794, 795, 796, 797, 798, 799, 800, 801, 802, 803, 804, 805, 806, 807, 808, 809, 810, 811, 812, 813, 814, 815, 816, 817, 818, 819, 820, 821, 822, 823, 824, 825, 826, 827, 828, 829, 830, 831, 832, 833, 834, 835, 836, 837, 838, 839, 840, 841, 842, 843, 844, 845, 846, 847, 848, 849, 850, 851, 852, 853, 854, 855, 856, 857, 858, 859, 860, 861, 862, 863, 864, 865, 866, 867, 868, 869, 870, 871, 872, 873, 874, 875, 876, 877, 878, 879, 880, 881, 882, 883, 884, 885, 886, 887, 888, 889, 890, 891, 892, 893, 894, 895, 896, 897, 898, 899, 900, 901, 902, 903, 904, 905, 906, 907, 908, 909, 910, 911, 912, 913, 914, 915, 916, 917, 918, 919, 920, 921, 922, 923, 924, 925, 926, 927, 928, 929, 930, 931, 932, 933, 934, 935, 936, 937, 938, 939, 940, 941, 942, 943, 944, 945, 946, 947, 948, 949, 950, 951, 952, 953, 954, 955, 956, 957, 958, 959, 960, 961, 962, 963, 964, 965, 966, 967, 968, 969, 970, 971, 972, 973, 974, 975, 976, 977, 978, 979, 980, 981, 982, 983, 984, 985, 986, 987, 988, 989, 990, 991, 992, 993, 994, 995, 996, 997, 998, 999, 1000, 1001, 1002, 1003, 1004, 1005, 1006, 1007, 1008, 1009, 1010, 1011, 1012, 1013, 1014, 1015, 1016, 1017, 1018, 1019, 1020, 1021, 1022, 1023, 1024, 1025, 1026, 1027, 1028, 1029, 1030, 1031, 1032, 1033, 1034, 1035, 1036, 1037, 1038, 1039, 1040, 1041, and 1042 or active variant or fragments thereof. In other embodiments, the host cells, plants, plant cells, plant parts and seed are provided which comprise at least one heterologous polynucleotide encoding a dicamba decarboxylase polypeptide which comprises a catalytic residue geometry as set forth in Table 3 or a substantially similar geometry. Such sequences are discussed elsewhere herein.

[0075] In specific embodiments, host cells, plants, plant cells, plant parts and seed are provided which comprise at least one heterologous polynucleotide encoding a dicamba decarboxylase polypeptide comprising:

```
(SEQ ID NO: 1041)
                                5 10
Met Ala Xaa Gly Lys Val Xaa Leu Glu Glu His Xaa
                15 20
Ala Ile Xaa Xaa Thr Leu Xaa Xaa Xaa Ala Xaa Phe
25 30 35
Val Pro Xaa Xaa Tyr Xaa Lys Xaa Leu Xaa His Arg
                        40 45
Leu Xaa Asp Xaa Gln Xaa Xaa Arg Leu Xaa Xaa Met
        50 55 60
Asp Xaa His Xaa Ile Xaa Xaa Met Xaa Leu Ser Leu
                                65 70
Xaa Ala Xaa Xaa Xaa Gln Xaa Xaa Xaa Xaa Arg Xaa
                75 80
Xaa Ala Xaa Xaa Xaa Ala Xaa Arg Xaa Asn Asp Xaa
85 90 95
Xaa Ala Glu Xaa Xaa Ala Xaa Xaa Xaa Xaa Arg Phe
                        100 105
Xaa Ala Phe Xaa Xaa Xaa Pro Xaa Xaa Asp Xaa Xaa
        110 115 120
Xaa Ala Xaa Xaa Glu Leu Gln Arg Xaa Val Xaa Xaa
                                125 130
Leu Gly Xaa Val Gly Ala Xaa Val Asn Gly Phe Ser
                135 140
Xaa Glu Gly Asp Xaa Xaa Thr Pro Leu Tyr Tyr Asp
145 150 155
Leu Pro Xaa Tyr Arg Pro Phe Trp Xaa Glu Val Glu
                        160 165
Lys Leu Asp Val Pro Phe Tyr Leu His Pro Xaa Asn
        170 175 180
Pro Leu Pro Gln Asp Xaa Arg Ile Tyr Xaa Gly His
                                185 190
Pro Trp Leu Leu Gly Pro Thr Trp Ala Phe Ala Gln
                195 200
Glu Thr Xaa Val His Ala Leu Arg Leu Met Ala Ser
205 210 215
Gly Leu Phe Asp Glu His Pro Xaa Leu Xaa Ile Ile
                        220 225
Leu Gly His Xaa Gly Glu Gly Leu Pro Tyr Met Xaa
        230 235 240
Xaa Arg Ile Asp His Arg Xaa Xaa Xaa Xaa Xaa Xaa
                                245 250
Pro Pro Xaa Tyr Xaa Ala Lys Xaa Xaa Phe Xaa Asp
                255 260
Tyr Phe Xaa Glu Asn Phe Xaa Xaa Thr Thr Ser Gly
265 270 275
Asn Phe Arg Thr Gln Thr Leu Ile Asp Ala Ile Leu
                        280 285
Glu Xaa Gly Ala Asp Arg Ile Leu Phe Ser Thr Asp
        290 295 300
Trp Pro Phe Glu Asn Ile Asp His Ala Xaa Xaa Trp
                                305 310
Phe Xaa Xaa Xaa Ser Ile Ala Glu Ala Asp Arg Xaa
                315 320
Lys Ile Gly Xaa Thr Asn Ala Xaa Xaa Leu Phe Lys
325
Leu Asp Xaa Xaa,
```

wherein

[0076] Xaa at position 3 is Gln, Gly, Met or Pro; Xaa at position 7 is Ala or Cys; Xaa at position 12 is Phe, Met, Val or Trp; Xaa at position 15 is Pro or Thr; Xaa at position 16 is Glu or Ala; Xaa at position 19 is Gln, Glu or Asn; Xaa at position 20 is Asp, Cys, Phe, Met or Trp; Xaa at position 21 is Ser, Ala, Gly or Val; Xaa at position 23 is Gly or Asp; Xaa at position 27 is Gly, Ala, Asp, Glu, Pro, Arg, Ser, Thr or Tyr; Xaa at position 28 is Asp, Cys, Glu, Phe or Gly; Xaa at position 30 is Trp, Leu or Val; Xaa at position 32 is Glu or Val; Xaa at position 34 is Gln, Ala or Trp; Xaa at position 38 is Leu, Ile, Met, Arg, Thr or Val; Xaa at position 40 is Ile, Met, Ser or Val; Xaa at position 42 is Asp, Ala, Gly, Lys, Met, Ser or Thr; Xaa at position 43 is Thr, Cys, Asp, Glu, Gly, Met, Gln, Arg or Tyr; Xaa at position 46 is Lys, Gly, Asn or Arg; Xaa at position 47 is Leu, Cys, Glu, Lys or Ser; Xaa at position 50 is Ala, Lys, Arg, Ser, Thr or Val; Xaa at position 52 is Gly, Glu, Leu, Asn or Gln; Xaa at position 54 is Glu or Gly; Xaa at position 55 is Thr or Leu; Xaa at position 57 is Ile, Ala or Val; Xaa at position 61 is Asn, Ala, Gly, Leu or Ser; Xaa at position 63 is Pro or Val; Xaa at position 64 is Ala, Gly, His or Ser; Xaa at position 65 is Val or Cys; Xaa at position 67 is Ala or Ser; Xaa at position 68 is Ile or Gln; Xaa at position 69 is Pro, Gly, Arg, Ser or Val; Xaa at position 70 is Asp or His; Xaa at position 72 is Arg, Lys or Val; Xaa at position 73 is Lys, Glu, Gln or Arg; Xaa at position 75 is Ile or Arg; Xaa at position 76 is Glu or Gly; Xaa at position 77 is Ile, Met, Arg, Ser or Val; Xaa at position 79 is Arg or Gln; Xaa at position 81 is Ala or Ser; Xaa at position 84 is Val, Cys, Phe or Met; Xaa at position 85 is Leu or Ala; Xaa at position 88 is Glu or Lys; Xaa at position 89 is Cys, Ile or Val; Xaa at position 91 is Lys or Arg; Xaa at position 92 is Arg or Lys; Xaa at position 93 is Pro, Ala or Arg; Xaa at position 94 is Asp, Cys, Gly, Gln or Ser; Xaa at position 97 is Leu, Lys or Arg; Xaa at position 100 is Ala, Gly or Ser; Xaa at position 101 is Ala or Gly; Xaa at position 102 is Leu or Val; Xaa at position 104 is Leu or Met; Xaa at position 105 is Gln or Gly; Xaa at position 107 is Pro or Val; Xaa at position 108 is Asp or Glu; Xaa at position 109 is Ala, Gly, Met or Val; Xaa at position 111 is Thr, Ala, Cys, Gly, Ser or Val; Xaa at position 112 is Glu, Gly, Arg or Ser; Xaa at position 117 is Cys, Ala or Thr; Xaa at position 119 is Asn, Ala, Cys, Arg or Ser; Xaa at position 120 is Asp or Thr; Xaa at position 123 is Phe or Leu; Xaa at position 127 is Leu or Met; Xaa at position 133 is Gln or Val; Xaa at position 137 is Gly, Ala or Glu; Xaa at position 138 is Gln or Gly; Xaa at position 147 is Gln or Ile; Xaa at position 153 is Gly or Lys; Xaa at position 167 is Arg or Glu; Xaa at position 174 is Ser or Ala; Xaa at position 178 is Asp or Glu; Xaa at position 195 is Ala or Gly; Xaa at position 212 is Arg, Gly or Gln; Xaa at position 214 is Asn or Gln; Xaa at position 220 is Met or Leu; Xaa at position 228 is Met or Leu; Xaa at position 229 is Trp or Tyr; Xaa at position 235 is Val or Ile; Xaa at position 236 is Ala, Gly, Gln or Trp; Xaa at position 237 is Trp or Leu; Xaa at position 238 is Val, Gly or Pro; Xaa at position 239 is Lys, Ala, Asp, Glu, Gly or His; Xaa at position 240 is Leu, Ala, Asp, Glu, Gly or Val; Xaa at position 243 is Arg, Ala, Asp, Lys, Ser or Val; Xaa at position 245 is Pro or Ala; Xaa at position 248 is Arg or Lys; Xaa at position 249 is Arg or Pro; Xaa at position 251 is Met or Val; Xaa at position 255 is Asn, Ala, Leu, Met, Gln, Arg or Ser; Xaa at position 259 is His or Trp; Xaa at position 260 is Ile or Leu; Xaa at position 278 is Ile or Leu; Xaa at position 298 is Ser, Ala or Thr; Xaa at position 299 is Asp or Ala; Xaa at position 302 is Asn or Ala; Xaa at position 303 is Ala, Cys, Asp, Glu or Ser; Xaa at position 304 is Thr or Val; Xaa at position 312 is Val or Leu; Xaa at position 316 is Arg or Ser; Xaa at position 320 is Arg or Leu; Xaa at position 321 is Arg or Asn; Xaa at position 327 is Gly, Leu, Gin or Val; Xaa at position 328 is Ala, Cys, Asp, Arg, Ser, Thr or Val; wherein one or more amino acid(s) designated by Xaa in SEQ ID NO: 1041 is an amino acid different from the corresponding amino acid of SEQ ID NO: 109; and wherein the polypeptide having dicamba decarboxylase activity has increased dicamba decarboxylase activity compared to the polypeptide of SEQ ID NO: 109.

[0077] In specific embodiments, host cells, plants, plant cells, plant parts and seed are provided which comprise at least one heterologous polynucleotide encoding a dicamba decarboxylase polypeptide comprising:

```
(SEQ ID NO: 1042)
                                5 10
Met Ala Gln Gly Xaa Val Ala Leu Glu Glu His Phe
                15 20
Ala Ile Pro Xaa Thr Leu Xaa Asp Xaa Ala Xaa Phe
25 30 35
Val Pro Xaa Xaa Tyr Xaa Lys Glu Leu Gln His Arg
                        40 45
Leu Xaa Asp Xaa Gln Asp Xaa Arg Leu Xaa Xaa Met
        50 55 60
Asp Xaa His Xaa Ile Xaa Thr Met Xaa Leu Ser Leu
                                65 70
Xaa Ala Xaa Xaa Val Gln Xaa Ile Xaa Asp Arg Xaa
                75 80
Xaa Ala Ile Glu Xaa Ala Xaa Arg Ala Asn Asp Xaa
85 90 95
Leu Ala Glu Glu Xaa Ala Lys Arg Pro Xaa Arg Phe
                        100 105
Leu Ala Phe Ala Ala Leu Pro Xaa Gln Asp Xaa Xaa
        110 115 120
Ala Ala Xaa Xaa Glu Leu Gln Arg Xaa Val Xaa Xaa
                                125 130
Leu Gly Phe Val Gly Ala Xaa Val Asn Gly Phe Ser
                135 140
Xaa Glu Gly Asp Gly Gln Thr Pro Leu Tyr Tyr Asp
145 150 155
Leu Pro Gln Tyr Arg Pro Phe Trp Xaa Glu Val Glu
                        160 165
Lys Leu Asp Val Pro Phe Tyr Leu His Pro Arg Asn
        170 175 180
Pro Leu Pro Gln Asp Xaa Arg Ile Tyr Asp Gly His
                                185 190
Pro Trp Leu Leu Gly Pro Thr Trp Ala Phe Ala Gln
                195 200
Glu Thr Ala Val His Ala Leu Arg Leu Met Ala Ser
205 210 215
Gly Leu Phe Asp Glu His Pro Xaa Leu Xaa Ile Ile
                        220 225
Leu Gly His Xaa Gly Glu Gly Leu Pro Tyr Met Met
        230 235 240
Xaa Arg Ile Asp His Arg Xaa Xaa Trp Val Xaa Xaa
                                245 250
Pro Pro Xaa Tyr Xaa Ala Lys Arg Arg Phe Met Asp
                255 260
Tyr Phe Xaa Glu Asn Phe Xaa Ile Thr Thr Ser Gly
265 270 275
Asn Phe Arg Thr Gln Thr Leu Ile Asp Ala Ile Leu
                        280 285
Glu Ile Gly Ala Asp Arg Ile Leu Phe Xaa Thr Asp
        290 295 300
Trp Pro Phe Glu Asn Ile Asp His Ala Xaa Xaa Trp
                                305 310
Phe Xaa Xaa Xaa Ser Ile Ala Glu Ala Asp Arg Xaa
                315 320
Lys Ile Gly Arg Thr Asn Ala Xaa Xaa Leu Phe Lys
325
Leu Asp Xaa Xaa
```

wherein
Xaa at position 5 is Lys or Leu; Xaa at position 16 is Glu or Ala; Xaa at position 19 is Gln or Asn; Xaa at position 21 is Ser or Ala; Xaa at position 23 is Gly or Asp; Xaa at position 27 is Gly or Ser; Xaa at position 28 is Asp, Cys or Glu; Xaa at position 30 is Trp or Leu; Xaa at position 38 is Leu or Met; Xaa at position 40 is Ile or Met; Xaa at position 43 is Thr, Glu or Gln; Xaa at position 46 is Lys, Asn or Arg; Xaa at position 47 is Leu or Glu; Xaa at position 50 is Ala, Lys or Arg; Xaa at position 52 is Gly, Glu or Gln; Xaa at position 54 is Glu or Gly; Xaa at position 57 is Ile or Val; Xaa at position 61 is Asn or Ala; Xaa at position 63 is Pro or Val; Xaa at position 64 is Ala or Gly; Xaa at position 67 is Ala, Gly or Ser; Xaa at position 69 is Pro, Gly or Val; Xaa at position 72 is Arg or Val; Xaa at position 73 is Lys, Glu or Gln; Xaa at position 77 is Ile or Leu; Xaa at position 79 is Arg or Lys; Xaa at position 84 is Val, Phe or Met; Xaa at position 89 is Cys or Val; Xaa at position 94 is Asp or Gly; Xaa at position 104 is Leu or Met; Xaa at position 107 is Pro or Val; Xaa at position 108 is Asp or Glu; Xaa at position 111 is Thr or Ser; Xaa at position 112 is Glu or Ser; Xaa at position 117 is Cys or Thr; Xaa at position 119 is Asn, Ala or Arg; Xaa at position 120 is Asp or Thr; Xaa at position 127 is Leu or Met; Xaa at position 133 is Gln or Val; Xaa at position 153 is Gly or Lys; Xaa at position 174 is Ser or Ala; Xaa at position 212 is Arg or Gly; Xaa at position 214 is Asn or Gln; Xaa at position 220 is Met or Leu; Xaa at position 229 is Trp or Tyr; Xaa at position 235 is Val or Ile; Xaa at position 236 is Ala or Gly; Xaa at position 239 is Lys, Glu or His; Xaa at position 240 is Leu, Ala or Glu; Xaa at position 243 is Arg or Asp; Xaa at position 245 is Pro or Ala; Xaa at position 255 is Asn or Leu; Xaa at position 259 is His or Trp; Xaa at position 286 is Ser or Ala; Xaa at position 298 is Ser, Ala or Thr; Xaa at position 299 is Asp or Ala; Xaa at position 302 is Asn or Ala; Xaa at position 303 is Ala or Glu; Xaa at position 304 is Thr or Ala; Xaa at position 312 is Val or Leu; Xaa at position 320 is Arg or Leu; Xaa at position 321 is Arg or Asn; Xaa at position 327 is Gly, Leu or Val; Xaa at position 328 is Ala, Asp, Arg, Ser or Thr; wherein one or more amino acid(s) designated by Xaa in SEQ ID NO: 1042 is an amino acid different from the corresponding amino acid of SEQ ID NO: 109; and wherein the polypeptide having dicamba decarboxylase activity has increased dicamba decarboxylase activity compared to the polypeptide of SEQ ID NO: 109.

[0078] The host cell, plants, plant cells and seed which express the heterologous polynucleotide encoding the dicamba decarboxylase polypeptide can display an increased tolerance to an auxin-analog herbicide. “Increased tolerance” to an auxin-analog herbicide, such as dicamba, is demonstrated when plants which display the increased tolerance to the auxin-analog herbicide are subjected to the auxin-analog herbicide and a dose/response curve is shifted to the right when compared with that provided by an appropriate control plant. Such dose/response curves have “dose” plotted on the x-axis and “percentage injury”, “herbicidal effect” etc. plotted on the y-axis. Plants which are substantially “resistant” or “tolerant” to the auxin-analog herbicide exhibit few, if any, significant negative agronomic effects when subjected to the auxin-analog herbicide at concentrations and rates which are typically employed by the agricultural community to kill weeds in the field.

[0079] In specific embodiments, the heterologous polynucleotide encoding the dicamba decarboxylase polypeptide or active variant or fragment thereof in the host cell, plant or plant part is operably linked to a constitutive, tissue-preferred, or other promoter for expression in the host cell or the plant of interest.

[0080] As used herein, the term plant includes plant cells, plant protoplasts, plant cell tissue cultures from which plants can be regenerated, plant calli, plant clumps, and plant cells that are intact in plants or parts of plants such as embryos, pollen, ovules, seeds, leaves, flowers, branches, fruit, kernels, ears, cobs, husks, stalks, roots, root tips, anthers, and the like. Grain is intended to mean the mature seed produced by commercial growers for purposes other than growing or reproducing the species. Progeny, variants, and mutants of the regenerated plants are also included within the scope of the invention, provided that these parts comprise the introduced polynucleotides.

[0081] The polynucleotide encoding the dicamba decarboxylase polypeptide and active variants and fragments thereof may be used for transformation of any plant species, including, but not limited to, monocots and dicots. Examples of plant species of interest include, but are not limited to, corn (Zea mays), Brassica sp. (e.g., B. napus, B. rapa, B. juncea), particularly those Brassica species useful as sources of seed oil, alfalfa (Medicago sativa), rice (Oryza sativa), rye (Secale cereale), sorghum (Sorghum bicolor, Sorghum vulgare), millet (e.g., pearl millet (Pennisetum glaucum), proso millet (Panicum miliaceum), foxtail millet (Setaria italica), finger millet (Eleusine coracana)), sunflower (Helianthus annuus), safflower (Carthamus tinctorius), wheat (Triticum aestivum), soybean (Glycine max), tobacco (Nicotiana tabacum), potato (Solanum tuberosum), peanuts (Arachis hypogaea), cotton (Gossypium barbadense, Gossypium hirsutum), sweet potato (Ipomoea batatus), cassava (Manihot esculenta), coffee (Coffea spp.), coconut (Cocos nucifera), pineapple (Ananas comosus), citrus trees (Citrus spp.), cocoa (Theobroma cacao), tea (Camellia sinensis), banana (Musa spp.), avocado (Persea americana), fig (Ficus casica), guava (Psidium guajava), mango (Mangifera indica), olive (Olea europaea), papaya (Carica papaya), cashew (Anacardium occidentale), macadamia (Macadamia integrifolia), almond (Prunus amygdalus), sugar beets (Beta vulgaris), sugarcane (Saccharum spp.), oats, barley, vegetables, ornamentals, and conifers.

[0082] Vegetables include tomatoes (Lycopersicon esculentum), lettuce (e.g., Lactuca sativa), green beans (Phaseolus vulgaris), lima beans (Phaseolus limensis), peas (Lathyrus spp.), and members of the genus Cucumis such as cucumber (C. sativus), cantaloupe (C. cantalupensis), and musk melon (C. melo). Ornamentals include azalea (Rhododendron spp.), hydrangea (Macrophylla hydrangea), hibiscus (Hibiscus rosasanensis), roses (Rosa spp.), tulips (Tulipa spp.), daffodils (Narcissus spp.), petunias (Petunia hybrida), carnation (Dianthus caryophyllus), poinsettia (Euphorbia pulcherrima), and chrysanthemum.

[0083] Conifers that may be employed in practicing the present invention include, for example, pines such as loblolly pine (Pinus taeda), slash pine (Pinus elliotii), ponderosa pine (Pinus ponderosa), lodgepole pine (Pinus contorta), and Monterey pine (Pinus radiata); Douglas-fir (Pseudotsuga menziesii); Western hemlock (Tsuga canadensis); Sitka spruce (Picea glauca); redwood (Sequoia sempervirens); true firs such as silver fir (Abies amabilis) and balsam fir (Abies balsamea); and cedars such as Western red cedar (Thuja plicata) and Alaska yellow-cedar (Chamaecyparis nootkatensis), and Poplar and Eucalyptus. In specific embodiments, plants of the present invention are crop plants (for example, corn, alfalfa, sunflower, Brassica, soybean, cotton, safflower, peanut, sorghum, wheat, millet, tobacco, etc.). In other embodiments, corn and soybean plants are of interest.

[0084] Other plants of interest include grain plants that provide seeds of interest, oil-seed plants, and leguminous plants. Seeds of interest include grain seeds, such as corn, wheat, barley, rice, sorghum, rye, etc. Oil-seed plants include cotton, soybean, safflower, sunflower, Brassica, maize, alfalfa, palm, coconut, etc. Leguminous plants include beans and peas. Beans include guar, locust bean, fenugreek, soybean, garden beans, cowpea, mungbean, lima bean, fava bean, lentils, chickpea, etc.

[0085] A “subject plant or plant cell” is one in which genetic alteration, such as transformation, has been affected as to a gene of interest, or is a plant or plant cell which is descended from a plant or cell so altered and which comprises the alteration. A “control” or “control plant” or “control plant cell” provides a reference point for measuring changes in phenotype of the subject plant or plant cell.

[0086] A control plant or plant cell may comprise, for example: (a) a wild-type plant or cell, i.e., of the same germplasm, variety or line as the starting material for the genetic alteration which resulted in the subject plant or cell; (b) a plant or plant cell of the same genotype as the starting material but which has been transformed with a null construct (i.e. with a construct which has no known effect on the trait of interest, such as a construct comprising a marker gene); (c) a plant or plant cell which is a non-transformed segregant among progeny of a subject plant or plant cell; (d) a plant or plant cell genetically identical to the subject plant or plant cell but which is not exposed to conditions or stimuli that would induce expression of the gene of interest; or (e) the subject plant or plant cell itself, under conditions in which the gene of interest is not expressed.

### IV. Polynucleotide Constructs

[0087] The use of the term “polynucleotide” is not intended to limit the methods and compositions to polynucleotides comprising DNA. Those of ordinary skill in the art will recognize that polynucleotides can comprise ribonucleotides and combinations of ribonucleotides and deoxyribonucleotides. Such deoxyribonucleotides and ribonucleotides include both naturally occurring molecules and synthetic analogues. The polynucleotides employed herein also encompass all forms of sequences including, but not limited to, single-stranded forms, double-stranded forms, hairpins, stem-and-loop structures, and the like.

[0088] The polynucleotides encoding a dicamba decarboxylase polypeptide or active variant or fragment thereof can be provided in expression cassettes for expression in the plant of interest. The cassette can include 5′ and 3′ regulatory sequences operably linked to a polynucleotide encoding a dicamba decarboxylase polypeptide or an active variant or fragment thereof. “Operably linked” is intended to mean a functional linkage between two or more elements. For example, an operable linkage between a polynucleotide of interest and a regulatory sequence (i.e., a promoter) is a functional link that allows for expression of the polynucleotide of interest. Operably linked elements may be contiguous or non-contiguous. When used to refer to the joining of two protein coding regions, by operably linked is intended that the coding regions are in the same reading frame. Additional gene(s) can be provided on multiple expression cassettes. Such an expression cassette is provided with a plurality of restriction sites and/or recombination sites for insertion of the polynucleotide encoding a dicamba decarboxylase polypeptide or an active variant or fragment thereof to be under the transcriptional regulation of the regulatory regions.

[0089] The expression cassette can include in the 5′-3′ direction of transcription, a transcriptional and translational initiation region (i.e., a promoter), a polynucleotide encoding a dicamba decarboxylase polypeptide or an active variant or fragment thereof, and a transcriptional and translational termination region (i.e., termination region) functional in plants. The regulatory regions (i.e., promoters, transcriptional regulatory regions, and translational termination regions) and/or the polynucleotide encoding a dicamba decarboxylase polypeptide or an active variant or fragment thereof may be native/analogous to the host cell or to each other. Alternatively, the regulatory regions and/or the polynucleotide encoding the dicamba decarboxylase polypeptide of or an active variant or fragment thereof may be heterologous to the host cell or to each other. Moreover, as discussed in further detail elsewhere herein, the polynucleotide encoding the dicamba decarboxylase polypeptide can further comprise a polynucleotide encoding a “targeting signal” that will direct the dicamba decarboxylase polypeptide to a desired sub-cellular location.

[0090] As used herein, “heterologous” in reference to a sequence is a sequence that originates from a foreign species, or, if from the same species, is modified from its native form in composition and/or genomic locus by deliberate human intervention. For example, a promoter operably linked to a heterologous polynucleotide is from a species different from the species from which the polynucleotide was derived, or, if from the same/analogous species, one or both are modified from their original form and/or genomic locus, or the promoter is not the native promoter for the operably linked polynucleotide.

[0091] While it may be optimal to express the sequences using heterologous promoters, the native promoter sequences may be used. Such constructs can change expression levels of the polynucleotide encoding a dicamba decarboxylase polypeptide in the host cell, plant or plant cell. Thus, the phenotype of the host cell, plant or plant cell can be altered.

[0092] The termination region may be native with the transcriptional initiation region, may be native with the operably linked polynucleotide encoding a dicamba decarboxylase polypeptide or active variant or fragment thereof, may be native with the host cell (i.e., plant cell), or may be derived from another source (i.e., foreign or heterologous) to the promoter, the polynucleotide encoding a dicamba decarboxylase polypeptide or active fragment or variant thereof, the plant host, or any combination thereof. Convenient termination regions are available from the Ti-plasmid of A. tumefaciens, such as the octopine synthase and nopaline synthase termination regions. See also Guerineau et al. (1991) Mol. Gen. Genet. 262:141-144; Proudfoot (1991) Cell 64:671-674; Sanfacon et al. (1991) Genes Dev. 5:141-149; Mogen et al. (1990) Plant Cell 2:1261-1272; Munroe et al. (1990) Gene 91:151-158; Ballas et al. (1989) Nucleic Acids Res. 17:7891-7903; and Joshi et al. (1987) Nucleic Acids Res. 15:9627-9639.

[0093] Where appropriate, the polynucleotides may be optimized for increased expression in the transformed host cell (i.e., a microbial cell or a plant cell). In specific embodiments, the polynucleotides can be synthesized using plant-preferred codons for improved expression. See, for example, Campbell and Gowri (1990) Plant Physiol. 92:1-11 for a discussion of host-preferred codon usage. Methods are available in the art for synthesizing plant-preferred genes. See, for example, U.S. Pat. Nos. 5,380,831, and 5,436,391, and Murray et al. (1989) Nucleic Acids Res. 17:477-498, herein incorporated by reference in their entirety.

[0094] Additional sequence modifications are known to enhance gene expression in a cellular host. These include elimination of sequences encoding spurious polyadenylation signals, exon-intron splice site signals, transposon-like repeats, and other such well-characterized sequences that may be deleterious to gene expression. The G-C content of the sequence may be adjusted to levels average for a given cellular host, as calculated by reference to known genes expressed in the host cell. When possible, the sequence is modified to avoid predicted hairpin secondary mRNA structures.

[0095] The expression cassettes may additionally contain 5′ leader sequences. Such leader sequences can act to enhance translation. Translation leaders are known in the art and include: picornavirus leaders, for example, EMCV leader (Encephalomyocarditis 5′ noncoding region) (Elroy-Stein et al. (1989) Proc. Natl. Acad. Sci. USA 86:6126-6130); potyvirus leaders, for example, TEV leader (Tobacco Etch Virus) (Gallie et al. (1995) Gene 165(2):233-238), MDMV leader (Maize Dwarf Mosaic Virus) (Virology 154:9-20), and human immunoglobulin heavy-chain binding protein (BiP) (Macejak et al. (1991) Nature 353:90-94); untranslated leader from the coat protein mRNA of alfalfa mosaic virus (AMV RNA 4) (Jobling et al. (1987) Nature 325:622-625); tobacco mosaic virus leader (TMV) (Gallie et al. (1989) in Molecular Biology of RNA, ed. Cech (Liss, New York), pp. 237-256); and maize chlorotic mottle virus leader (MCMV) (Lommel et al. (1991) Virology 81:382-385. See also, Della-Cioppa et al. (1987) Plant Physiol. 84:965-968.

[0096] In preparing the expression cassette, the various DNA fragments may be manipulated, so as to provide for the DNA sequences in the proper orientation and, as appropriate, in the proper reading frame. Toward this end, adapters or linkers may be employed to join the DNA fragments or other manipulations may be involved to provide for convenient restriction sites, removal of superfluous DNA, removal of restriction sites, or the like. For this purpose, in vitro mutagenesis, primer repair, restriction, annealing, resubstitutions, e.g., transitions and transversions, may be involved.

[0097] A number of promoters can be used to express the various dicamba decarboxylase sequences disclosed herein, including the native promoter of the polynucleotide sequence of interest. The promoters can be selected based on the desired outcome. Such promoters include, for example, constitutive, tissue-preferred, or other promoters for expression in plants.

[0098] Constitutive promoters include, for example, the core promoter of the Rsyn7 promoter and other constitutive promoters disclosed in WO 99/43838 and U.S. Pat. No. 6,072,050; the core CaMV 35S promoter (Odell et al. (1985) Nature 313:810-812); rice actin (McElroy et al. (1990) Plant Cell 2:163-171); ubiquitin (Christensen et al. (1989) Plant Mol. Biol. 12:619-632 and Christensen et al. (1992) Plant Mol. Biol. 18:675-689); pEMU (Last et al. (1991) Theor. Appl. Genet. 81:581-588); MAS (Velten et al. (1984) EMBO J. 3:2723-2730); ALS promoter (U.S. Pat. No. 5,659,026); and the like. Other constitutive promoters include, for example, U.S. Pat. Nos. 5,608,149; 5,608,144; 5,604,121; 5,569,597; 5,466,785; 5,399,680; 5,268,463; 5,608,142; and 6,177,611.

[0099] Tissue-preferred promoters can be utilized to target enhanced expression of the polynucleotide encoding the dicamba decarboxylase polypeptide within a particular plant tissue. Tissue-preferred promoters include those described in Yamamoto et al. (1997) Plant J. 12(2):255-265; Kawamata et al. (1997) Plant Cell Physiol. 38(7):792-803; Hansen et al. (1997) Mol. Gen Genet. 254(3):337-343; Russell et al. (1997) Transgenic Res. 6(2):157-168; Rinehart et al. (1996) Plant Physiol. 112(3):1331-1341; Van Camp et al. (1996) Plant Physiol. 112(2):525-535; Canevascini et al. (1996) Plant Physiol. 112(2):513-524; Yamamoto et al. (1994) Plant Cell Physiol. 35(5):773-778; Lam (1994) Results Probl. Cell Differ. 20:181-196; Orozco et al. (1993) Plant Mol Biol. 23(6):1129-1138; Matsuoka et al. (1993) Proc Natl. Acad. Sci. USA 90(20):9586-9590; and Guevara-Garcia et al. (1993) Plant J. 4(3):495-505. Such promoters can be modified, if necessary, for weak expression.

[0100] Leaf-preferred promoters are known in the art. See, for example, Yamamoto et al. (1997) Plant J. 12(2):255-265; Kwon et al. (1994) Plant Physiol. 105:357-67; Yamamoto et al. (1994) Plant Cell Physiol. 35(5):773-778; Gotor et al. (1993) Plant J. 3:509-18; Orozco et al. (1993) Plant Mol. Biol. 23(6):1129-1138; and Matsuoka et al. (1993) Proc. Natl. Acad. Sci. USA 90(20):9586-9590.

[0101] Meristem-preferred promoters can also be employed. Such promoter can drive expression in meristematic tissue, including, for example, the apical meristem, axillary buds, root meristems, cotyledon meristem and/or hypocotyl meristem. Non-limiting examples of meristem-preferred promoters include the shoot meristem specific promoter such as the Arabidopsis UFO gene promoter (Unusual Floral Organ) (USA6239329), the meristem-specific promoters of FTM1, 2, 3 and SVP1, 2, 3 genes as discussed in US Patent App. 20120255064, and the shoot meristem-specific promoter disclosed in U.S. Pat. No. 5,880,330. Each of these references is herein incorporated by reference in their entirety.

[0102] The expression cassette can also comprise a selectable marker gene for the selection of transformed cells. Selectable marker genes are utilized for the selection of transformed cells or tissues. Marker genes include genes encoding antibiotic resistance, such as those encoding neomycin phosphotransferase II (NEO) and hygromycin phosphotransferase (HPT), as well as genes conferring resistance to herbicidal compounds, such as glyphosate, glufosinate ammonium, bromoxynil, sulfonylureas. Additional selectable markers include phenotypic markers such as β-galactosidase and fluorescent proteins such as green fluorescent protein (GFP) (Su et al. (2004) Biotechnol Bioeng 85:610-9 and Fetter et al. (2004) Plant Cell 16:215-28), cyan florescent protein (CYP) (Bolte et al. (2004) J. Cell Science 117:943-54 and Kato et al. (2002) Plant Physiol 129:913-42), and yellow florescent protein (PhiYFP™ from Evrogen, see, Bolte et al. (2004) J. Cell Science 117:943-54). For additional selectable markers, see generally, Yarranton (1992) Curr. Opin. Biotech. 3:506-511; Christopherson et al. (1992) Proc. Natl. Acad. Sci. USA 89:6314-6318; Yao et al. (1992) Cell 71:63-72; Reznikoff (1992) Mol. Microbiol. 6:2419-2422; Barkley et al. (1980) in The Operon, pp. 177-220; Hu et al. (1987) Cell 48:555-566; Brown et al. (1987) Cell 49:603-612; Figge et al. (1988) Cell 52:713-722; Deuschle et al. (1989) Proc. Natl. Acad. Aci. USA 86:5400-5404; Fuerst et al. (1989) Proc. Natl. Acad. Sci. USA 86:2549-2553; Deuschle et al. (1990) Science 248:480-483; Gossen (1993) Ph.D. Thesis, University of Heidelberg; Reines et al. (1993) Proc. Natl. Acad. Sci. USA 90:1917-1921; Labow et al. (1990) Mol. Cell. Biol. 10:3343-3356; Zambretti et al. (1992) Proc. Natl. Acad. Sci. USA 89:3952-3956; Baim et al. (1991) Proc. Natl. Acad. Sci. USA 88:5072-5076; Wyborski et al. (1991) Nucleic Acids Res. 19:4647-4653; Hillenand-Wissman (1989) Topics Mol. Struc. Biol. 10:143-162; Degenkolb et at (1991) Antimicrob. Agents Chemother. 35:1591-1595; Kleinschnidt et al. (1988) Biochemistry 27:1094-1104; Bonin (1993) Ph.D. Thesis, University of Heidelberg; Gossen et al. (1992) Proc. Natl. Acad. Sci. USA 89:5547-5551; Oliva et al. (1992) Antimicrob. Agents Chemother. 36:913-919; Hlavka et al. (1985) Handbook of Experimental Pharmacology, Vol. 78 (Springer-Verlag, Berlin); Gill et al. (1988) Nature 334:721-724. Such disclosures are herein incorporated by reference in their entirety. The above list of selectable marker genes is not meant to be limiting.

### V. Stacking Other Traits of Interest

[0103] In some embodiments, the polynucleotide encoding the dicamba decarboxylase polypeptide or an active variant or fragment thereof are engineered into a molecular stack. Thus, the various host cells, plants, plant cells and seeds disclosed herein can further comprise one or more traits of interest, and in more specific embodiments, the host cell, plant, plant part or plant cell is stacked with any combination of polynucleotide sequences of interest in order to create plants with a desired combination of traits. As used herein, the term “stacked” includes having the multiple traits present in the same plant (i.e., both traits are incorporated into the nuclear genome, one trait is incorporated into the nuclear genome and one trait is incorporated into the genome of a plastid, or both traits are incorporated into the genome of a plastid). In one non-limiting example, “stacked traits” comprise a molecular stack where the sequences are physically adjacent to each other. A trait, as used herein, refers to the phenotype derived from a particular sequence or groups of sequences. In one embodiment, the molecular stack comprises at least one additional polynucleotide that confers tolerance to at least one additional auxin-analog herbicide and/or at least one additional polynucleotide that confers tolerance to a second herbicide.

[0104] Thus, in one embodiment, the host cell, plants, plant cells or plant part having the polynucleotide encoding the dicamba decarboxylase polypeptide or an active variant or fragment thereof is stacked with at least one other dicamba decarboxylase sequence. Alternatively, the host cell, plant, plant cells or seed having the heterologous polynucleotide encoding the dicamba decarboxylase polypeptide can have the dicamba decarboxylase sequence stacked with an additional sequence that confers tolerance to an auxin-analog herbicide via a different mode of action than that of the dicamba decarboxylase sequence. Such sequences include, but are not limited to, the aryloxyalkanoate dioxygenase polynucleotides which confer tolerance to 2,4-D and other phenoxy auxin herbicides, as well as, to aryloxyphenoxypropionate herbicides as described, for example, in WO2005/107437 and WO2007/053482. Additional sequence can further include dicamba-tolerance polynucleotides as described, for example, in Herman et al. (2005) J. Biol. Chem. 280: 24759-24767, U.S. Pat. Nos. 7,820,883; 8,088,979; 8,071,874; 8,119,380; 7,105,724; 7,855,3326; 8,084,666; 7,838,729; 5,670,454; US Application Publications 2012/0064539, 2012/0064540, 2011/0016591, 2007/0220629, 2001/0016890, 2003/0115626, WO2012/094555, WO2007/46706, WO2012024853, EP0716808, and EP1379539, and an acetyl coenzyme A carboxylase (ACCase) polypeptides, each of which is herein incorporated by reference in their entirety. Other sequences that confer tolerance auxin, such as methyltransferases, are set forth in US 2010/0205696 and WO 2010/091353, both of which are herein incorporated by reference in their entirety. Other auxin tolerance proteins are known and could be employed.

[0105] In another embodiment, the host cell, plant, plant cell or plant part having the polynucleotide encoding the dicamba decarboxylase polypeptide or an active variant or fragment thereof is stacked with at least one polynucleotide encoding a dicamba monooxygenase (DOM). See, for example, U.S. Pat. No. 8,207,092, which is herein incorporated by reference in its entirety.

[0106] In still other embodiments, host cells, plants, plant cells, explants and expression cassettes comprising the polynucleotide encoding the dicamba decarboxylase polypeptide or active variant or fragment thereof are stacked with a sequence that confers tolerance to HPPD inhibitors or an HPPD detoxification enzyme. For example, a P450 sequence could be employed which provides tolerance to HPPD-inhibitors by metabolism of the herbicide. Such sequences include, but are not limited to, the NSF1 gene. See, US 2007/0214515 and US 2008/0052797, both of which are herein incorporated by reference in their entirety. Additional HPPD target site genes that confer herbicide tolerance to plants include those set forth in U.S. Pat. No. 6,245,968 B1; 6,268,549; and 6,069,115; international publication WO 99/23886, US App Pub. 2012-0042413 and US App Pub 2012-0042414, each of which is herein incorporated by reference in their entirety.

[0107] In some embodiments, the host cell, plant or plant cell having the heterologous polynucleotide encoding a dicamba decarboxylase polypeptide or active variant or fragment thereof may be stacked with sequences that confer tolerance to glyphosate such as, for example, glyphosate N-acetyltransferase. See, for example, WO02/36782, US Publication 2004/0082770 and WO 2005/012515, U.S. Pat. No. 7,462,481, U.S. Pat. No. 7,405,074, each of which is herein incorporated by reference in their entirety. Additional glyphosate-tolerance traits include a sequence that encodes a glyphosate oxido-reductase enzyme as described more fully in U.S. Pat. Nos. 5,776,760 and 5,463,175. Other traits that could be combined with the polynucleotide encoding the dicamba decarboxylase polypeptide or active variant or fragment thereof include those derived from polynucleotides that confer on the plant the capacity to produce a higher level or glyphosate insensitive 5-enolpyruvylshikimate-3-phosphate synthase (EPSPS), for example, as more fully described in U.S. Pat. No. 6,248,876 B1; 5,627,061; 5,804,425; 5,633,435; 5,145,783; 4,971,908; 5,312,910; 5,188,642; 4,940,835; 5,866,775; 6,225,114 B1; 6,130,366; 5,310,667; 4,535,060; 4,769,061; 5,633,448; 5,510,471; RE 36,449; RE 37,287 E; and 5,491,288; and international publications WO 97/04103; WO 00/66746; WO 01/66704; and WO 00/66747, 6,040,497; 5,094,945; 5,554,798; 6,040,497; Zhou et al. (1995) Plant Cell Rep.: 159-163; WO 0234946; WO 9204449; 6,225,112; 4,535,060, and 6,040,497, which are incorporated herein by reference in their entireties for all purposes. Additional EPSP synthase sequences include, gdc-1 (U.S. App. Publication 20040205847); EPSP synthases with class III domains (U.S. App. Publication 20060253921); gdc-1 (U.S. App. Publication 20060021093); gdc-2 (U.S. App. Publication 20060021094); gro-1 (U.S. App. Publication 20060150269); grg23 or grg 51 (U.S. App. Publication 20070136840); GRG32 (U.S. App. Publication 20070300325); GRG33, GRG35, GRG36, GRG37, GRG38, GRG39 and GRG50 (U.S. App. Publication 20070300326); or EPSP synthase sequences disclosed in, U.S. App. Publication 20040177399; 20050204436; 20060150270; 20070004907; 20070044175; 2007010707; 20070169218; 20070289035; and, 20070295251; each of which is herein incorporated by reference in their entirety.

[0108] In other embodiments, the host cell, plant or plant cell or plant part having the heterologous polynucleotide encoding the dicamba decarboxylase polypeptide or an active variant or fragment thereof is stacked with, for example, a sequence which confers tolerance to an ALS inhibitor. As used herein, an “ALS inhibitor-tolerant polypeptide” comprises any polypeptide which when expressed in a plant confers tolerance to at least one ALS inhibitor. Varieties of ALS inhibitors are known and include, for example, sulfonylurea, imidazolinone, triazolopyrimidines, pryimidinyoxy(thio)benzoates, and/or sulfonylaminocarbonyltriazolinone herbicides. Additional ALS inhibitors are known and are disclosed elsewhere herein. It is known in the art that ALS mutations fall into different classes with regard to tolerance to sulfonylureas, imidazolinones, triazolopyrimidines, and pyrimidinyl(thio)benzoates, including mutations having the following characteristics: (1) broad tolerance to all four of these groups; (2) tolerance to imidazolinones and pyrimidinyl(thio)benzoates; (3) tolerance to sulfonylureas and triazolopyrimidines; and (4) tolerance to sulfonylureas and imidazolinones.

[0109] Various ALS inhibitor-tolerant polypeptides can be employed. In some embodiments, the ALS inhibitor-tolerant polynucleotides contain at least one nucleotide mutation resulting in one amino acid change in the ALS polypeptide. In specific embodiments, the change occurs in one of seven substantially conserved regions of acetolactate synthase. See, for example, Hattori et al. (1995) Molecular Genetics and Genomes 246:419-425; Lee et al. (1998) EMBO Journal 7:1241-1248; Mazur et al. (1989) Ann. Rev. Plant Phys. 40:441-470; and U.S. Pat. No. 5,605,011, each of which is incorporated by reference in their entirety. The ALS inhibitor-tolerant polypeptide can be encoded by, for example, the SuRA or SuRB locus of ALS. In specific embodiments, the ALS inhibitor-tolerant polypeptide comprises the C3 ALS mutant, the HRA ALS mutant, the S4 mutant or the S4/HRA mutant or any combination thereof. Different mutations in ALS are known to confer tolerance to different herbicides and groups (and/or subgroups) of herbicides; see, e.g., Tranel and Wright (2002) Weed Science 50:700-712. See also, U.S. Pat. Nos. 5,605,011, 5,378,824, 5,141,870, and 5,013,659, each of which is herein incorporated by reference in their entirety. The soybean, maize, and Arabidopsis HRA sequences are disclosed, for example, in WO2007/024782, herein incorporated by reference in their entirety.

[0110] In some embodiments, the ALS inhibitor-tolerant polypeptide confers tolerance to sulfonylurea and imidazolinone herbicides. The production of sulfonylurea-tolerant plants and imidazolinone-tolerant plants is described more fully in U.S. Pat. Nos. 5,605,011; 5,013,659; 5,141,870; 5,767,361; 5,731,180; 5,304,732; 4,761,373; 5,331,107; 5,928,937; and 5,378,824; and international publication WO 96/33270, which are incorporated herein by reference in their entireties for all purposes. In specific embodiments, the ALS inhibitor-tolerant polypeptide comprises a sulfonamide-tolerant acetolactate synthase (otherwise known as a sulfonamide-tolerant acetohydroxy acid synthase) or an imidazolinone-tolerant acetolactate synthase (otherwise known as an imidazolinone-tolerant acetohydroxy acid synthase).

[0111] In further embodiments, the host cell, plants or plant cell or plant part having the heterologous polynucleotide encoding the dicamba decarboxylase polypeptide or an active variant or fragment thereof is stacked with, for example, a sequence which confers tolerance to an ALS inhibitor and glyphosate tolerance. In one embodiment, the polynucleotide encoding the dicamba decarboxylase polypeptide or active variant or fragment thereof is stacked with HRA and a glyphosate N-acetyltransferase. See, WO2007/024782, 2008/0051288 and WO 2008/112019, each of which is herein incorporated by reference in their entirety.

[0112] Other examples of herbicide-tolerance traits that could be combined with the host cell, plant or plant cell or plant part having the heterologous polynucleotide encoding the dicamba decarboxylase polypeptide or an active variant or fragment thereof include those conferred by polynucleotides encoding an exogenous phosphinothricin acetyltransferase, as described in U.S. Pat. Nos. 5,969,213; 5,489,520; 5,550,318; 5,874,265; 5,919,675; 5,561,236; 5,648,477; 5,646,024; 6,177,616; and 5,879,903. Plants containing an exogenous phosphinothricin acetyltransferase can exhibit improved tolerance to glufosinate herbicides, which inhibit the enzyme glutamine synthase. Other examples of herbicide-tolerance traits that could be combined with the plants or plant cell or plant part having the heterologous polynucleotide encoding the dicamba decarboxylase polypeptide or an active variant or fragment thereof include those conferred by polynucleotides conferring altered protoporphyrinogen oxidase (protox) activity, as described in U.S. Pat. Nos. 6,288,306 B1; 6,282,837 B1; and 5,767,373; and international publication WO 01/12825 or those that are protoporphorinogen detoxification enzyme. Plants containing such polynucleotides can exhibit improved tolerance to any of a variety of herbicides which target the protox enzyme (also referred to as “protox inhibitors”).

[0113] Other examples of herbicide-tolerance traits that could be combined with the host cell, plant or plant cell or plant part having the heterologous polynucleotide encoding the dicamba decarboxylase polypeptide or an active variant or fragment thereof include those conferring tolerance to at least one herbicide in a plant such as, for example, a maize plant or horseweed. Herbicide-tolerant weeds are known in the art, as are plants that vary in their tolerance to particular herbicides. See, e.g., Green and Williams (2004) “Correlation of Corn (Zea mays) Inbred Response to Nicosulfuron and Mesotrione,” poster presented at the WSSA Annual Meeting in Kansas City, Mo., Feb. 9-12, 2004; Green (1998) Weed Technology 12: 474-477; Green and Ulrich (1993) Weed Science 41: 508-516. The trait(s) responsible for these tolerances can be combined by breeding or via other methods with the plants or plant cell or plant part having the heterologous polynucleotide encoding the dicamba decarboxylase or an active variant or fragment thereof to provide a plant of the invention, as well as, methods of use thereof.

[0114] In still further embodiments, the polynucleotide encoding the dicamba decarboxylase polypeptide can be stacked with at least one polynucleotide encoding a homogentisate solanesyltransferase (HST). See, for example, WO2010023911 herein incorporated by reference in its entirety. In such embodiments, classes of herbicidal compounds—which act wholly or in part by inhibiting HST can be applied over the plants having the HTS polypeptide.

[0115] The host cell, plant or plant cell or plant part having the polynucleotide encoding the dicamba decarboxylase polypeptide or an active variant or fragment thereof can also be combined with at least one other trait to produce plants that further comprise a variety of desired trait combinations including, but not limited to, traits desirable for animal feed such as high oil content (e.g., U.S. Pat. No. 6,232,529); balanced amino acid content (e.g., hordothionins (U.S. Pat. Nos. 5,990,389; 5,885,801; 5,885,802; and 5,703,409; U.S. Pat. No. 5,850,016); barley high lysine (Williamson et al. (1987) Eur. J. Biochem. 165: 99-106; and WO 98/20122) and high methionine proteins (Pedersen et al. (1986) J. Biol. Chem. 261: 6279; Kirihara et al. (1988) Gene 71: 359; and Musumura et al. (1989) Plant Mol. Biol. 12:123)); increased digestibility (e.g., modified storage proteins (U.S. application Ser. No. 10/053,410, filed Nov. 7, 2001); and thioredoxins (U.S. application Ser. No. 10/005,429, filed Dec. 3, 2001)); the disclosures of which are herein incorporated by reference in their entirety. Desired trait combinations also include LLNC (low linolenic acid content; see, e.g., Dyer et al. (2002) Appl. Microbiol. Biotechnol. 59: 224-230) and OLCH (high oleic acid content; see, e.g., Fernandez-Moya et al. (2005) J. Agric. Food Chem. 53: 5326-5330).

[0116] The host cell, plant or plant cell or plant part having the polynucleotide encoding the dicamba decarboxylase polypeptide or an active variant or fragment thereof can also be combined with other desirable traits such as, for example, fumonisim detoxification genes (U.S. Pat. No. 5,792,931), avirulence and disease resistance genes (Jones et al. (1994) Science 266: 789; Martin et al. (1993) Science 262: 1432; Mindrinos et al. (1994) Cell 78: 1089), and traits desirable for processing or process products such as modified oils (e.g., fatty acid desaturase genes (U.S. Pat. No. 5,952,544; WO 94/11516)); modified starches (e.g., ADPG pyrophosphorylases (AGPase), starch synthases (SS), starch branching enzymes (SBE), and starch debranching enzymes (SDBE)); and polymers or bioplastics (e.g., U.S. Pat. No. 5,602,321; beta-ketothiolase, polyhydroxybutyrate synthase, and acetoacetyl-CoA reductase (Schubert et al. (1988) J. Bacteriol. 170:5837-5847) facilitate expression of polyhydroxyalkanoates (PHAs)); the disclosures of which are herein incorporated by reference in their entirety. One could also combine herbicide-tolerant polynucleotides with polynucleotides providing agronomic traits such as male sterility (e.g., see U.S. Pat. No. 5,583,210), stalk strength, flowering time, or transformation technology traits such as cell cycle regulation or gene targeting (e.g., WO 99/61619, WO 00/17364, and WO 99/25821); the disclosures of which are herein incorporated by reference in their entirety.

[0117] In other embodiments, the host cell, plant or plant cell or plant part having the polynucleotide encoding the dicamba decarboxylase polypeptide or an active variant or fragment thereof may be stacked with any other polynucleotides encoding polypeptides having pesticidal and/or insecticidal activity, such as Bacillus thuringiensis toxic proteins (described in U.S. Pat. Nos. 5,366,892; 5,747,450; 5,737,514; 5,723,756; 5,593,881; Geiser et al. (1986) Gene 48: 109; Lee et al. (2003) Appl. Environ. Microbiol. 69: 4648-4657 (Vip3A); Galitzky et al. (2001) Acta Crystallogr. D. Biol. Crystallogr. 57: 1101-1109 (Cry3Bb1); and Herman et al. (2004) J. Agric. Food Chem. 52: 2726-2734 (Cry1F)); lectins (Van Damme et al. (1994) Plant Mol. Biol. 24: 825, pentin (described in U.S. Pat. No. 5,981,722), and the like. The combinations generated can also include multiple copies of any one of the polynucleotides of interest.

[0118] In another embodiment, the host cell, plant or plant cell or plant part having the polynucleotide encoding the dicamba decarboxylase polypeptide or an active variant or fragment thereof can also be combined with the Rcgl sequence or biologically active variant or fragment thereof. The Rcgl sequence is an anthracnose stalk rot resistance gene in corn. See, for example, U.S. patent application Ser. Nos. 11/397,153, 11/397,275, and 11/397,247, each of which is herein incorporated by reference in their entirety.

[0119] These stacked combinations can be created by any method including, but not limited to, breeding plants by any conventional methodology, or genetic transformation. If the sequences are stacked by genetically transforming the plants, the polynucleotide sequences of interest can be combined at any time and in any order. The traits can be introduced simultaneously in a co-transformation protocol with the polynucleotides of interest provided by any combination of transformation cassettes. For example, if two sequences will be introduced, the two sequences can be contained in separate transformation cassettes (trans) or contained on the same transformation cassette (cis). Expression of the sequences can be driven by the same promoter or by different promoters. In certain cases, it may be desirable to introduce a transformation cassette that will suppress the expression of the polynucleotide of interest. This may be combined with any combination of other suppression cassettes or overexpression cassettes to generate the desired combination of traits in the plant. It is further recognized that polynucleotide sequences can be stacked at a desired genomic location using a site-specific recombination system. See, for example, WO99/25821, WO99/25854, WO99/25840, WO99/25855, and WO99/25853, all of which are herein incorporated by reference in their entirety. Additional systems can be used for site specific integration including, for example, various meganucleases systems as set forth in WO 2009/114321 (herein incorporated by reference in its entirety), which describes “custom” meganucleases. See, also, Gao et al. (2010) Plant Journal 1:176-187. Additional site specific integration systems include, but are not limited, to Zn Fingers, meganucleases, and TAL nucleases. See, for example, WO2010079430, WO2011072246, and US20110201118, each of which is herein incorporated by reference in their entirety.

### VI. Method of Introducing

[0120] Various methods can be used to introduce a sequence of interest into a host cell, plant or plant part. “Introducing” is intended to mean presenting to the host cell, plant, plant cell or plant part the polynucleotide or polypeptide in such a manner that the sequence gains access to the interior of a cell. The methods disclosed herein do not depend on a particular method for introducing a sequence into a host cell, plant or plant part, only that the polynucleotide or polypeptides gains access to the interior of at least one cell. Methods for introducing polynucleotides or polypeptides into plants are known in the art including, but not limited to, stable transformation methods, transient transformation methods, and virus-mediated methods.

[0121] “Stable transformation” is intended to mean that the nucleotide construct introduced into a host cell or plant integrates into the genome of the host cell or plant and is capable of being inherited by the progeny thereof. “Transient transformation” is intended to mean that a polynucleotide is introduced into the host cell or plant and does not integrate into the genome of the host cell or plant or a polypeptide is introduced into a host cell or plant.

[0122] Transformation protocols as well as protocols for introducing polypeptides or polynucleotide sequences into plants may vary depending on the type of plant or plant cell, i.e., monocot or dicot, targeted for transformation. Suitable methods of introducing polypeptides and polynucleotides into plant cells include microinjection (Crossway et al. (1986) Biotechniques 4:320-334), electroporation (Riggs et al. (1986) Proc. Natl. Acad. Sci. USA 83:5602-5606, Agrobacterium-mediated transformation (U.S. Pat. No. 5,563,055 and U.S. Pat. No. 5,981,840), direct gene transfer (Paszkowski et al. (1984) EMBO J. 3:2717-2722), and ballistic particle acceleration (see, for example, U.S. Pat. No. 4,945,050; U.S. Pat. No. 5,879,918; U.S. Pat. Nos. 5,886,244; and, 5,932,782; Tomes et al. (1995) in Plant Cell, Tissue, and Organ Culture: Fundamental Methods, ed. Gamborg and Phillips (Springer-Verlag, Berlin); McCabe et al. (1988) Biotechnology 6:923-926); and Lec1 transformation (WO 00/28058). Also see Weissinger et al. (1988) Ann. Rev. Genet. 22:421-477; Sanford et al. (1987) Particulate Science and Technology 5:27-37 (onion); Christou et al. (1988) Plant Physiol. 87:671-674 (soybean); McCabe et al. (1988) Bio/Technology 6:923-926 (soybean); Finer and McMullen (1991) In Vitro Cell Dev. Biol. 27P:175-182 (soybean); Singh et al. (1998) Theor. Appl. Genet. 96:319-324 (soybean); Datta et al. (1990) Biotechnology 8:736-740 (rice); Klein et al. (1988) Proc. Natl. Acad. Sci. USA 85:4305-4309 (maize); Klein et al. (1988) Biotechnology 6:559-563 (maize); U.S. Pat. Nos. 5,240,855; 5,322,783; and, 5,324,646; Klein et al. (1988) Plant Physiol. 91:440-444 (maize); Fromm et al. (1990) Biotechnology 8:833-839 (maize); Hooykaas-Van Slogteren et al. (1984) Nature (London) 311:763-764; U.S. Pat. No. 5,736,369 (cereals); Bytebier et al. (1987) Proc. Natl. Acad. Sci. USA 84:5345-5349 (Liliaceae); De Wet et al. (1985) in The Experimental Manipulation of Ovule Tissues, ed. Chapman et al. (Longman, N.Y.), pp. 197-209 (pollen); Kaeppler et al. (1990) Plant Cell Reports 9:415-418 and Kaeppler et al. (1992) Theor. Appl. Genet. 84:560-566 (whisker-mediated transformation); D'Halluin et al. (1992) Plant Cell 4:1495-1505 (electroporation); Li et al. (1993) Plant Cell Reports 12:250-255 and Christou and Ford (1995) Annals of Botany 75:407-413 (rice); Osjoda et al. (1996) Nature Biotechnology 14:745-750 (maize via Agrobacterium tumefaciens); all of which are herein incorporated by reference in their entirety.

[0123] In specific embodiments, the dicamba decarboxylase sequences or active variant or fragments thereof can be provided to a plant using a variety of transient transformation methods. Such transient transformation methods include, but are not limited to, the introduction of the dicamba decarboxylase protein or active variants and fragments thereof directly into the plant. Such methods include, for example, microinjection or particle bombardment. See, for example, Crossway et al. (1986) Mol Gen. Genet. 202:179-185; Nomura et al. (1986) Plant Sci. 44:53-58; Hepler et al. (1994) Proc. Natl. Acad. Sci. 91: 2176-2180 and Hush et al. (1994) The Journal of Cell Science 107:775-784, all of which are herein incorporated by reference in their entirety.

[0124] In other embodiments, the polynucleotide encoding the dicamba decarboxylase polypeptide or active variants or fragments thereof may be introduced into plants by contacting plants with a virus or viral nucleic acids. Generally, such methods involve incorporating a nucleotide construct of the invention within a DNA or RNA molecule. It is recognized that the an dicamba decarboxylase sequence may be initially synthesized as part of a viral polyprotein, which later may be processed by proteolysis in vivo or in vitro to produce the desired recombinant protein. Further, it is recognized that promoters of the invention also encompass promoters utilized for transcription by viral RNA polymerases. Methods for introducing polynucleotides into plants and expressing a protein encoded therein, involving viral DNA or RNA molecules, are known in the art. See, for example, U.S. Pat. Nos. 5,889,191, 5,889,190, 5,866,785, 5,589,367, 5,316,931, and Porta et al. (1996) Molecular Biotechnology 5:209-221; herein incorporated by reference in their entirety.

[0125] Methods are known in the art for the targeted insertion of a polynucleotide at a specific location in the plant genome. In one embodiment, the insertion of the polynucleotide at a desired genomic location is achieved using a site-specific recombination system. See, for example, WO99/25821, WO99/25854, WO99/25840, WO99/25855, and WO99/25853, all of which are herein incorporated by reference in their entirety. Briefly, the polynucleotide of the invention can be contained in transfer cassette flanked by two non-recombinogenic recombination sites. The transfer cassette is introduced into a plant having stably incorporated into its genome a target site which is flanked by two non-recombinogenic recombination sites that correspond to the sites of the transfer cassette. An appropriate recombinase is provided and the transfer cassette is integrated at the target site. The polynucleotide of interest is thereby integrated at a specific chromosomal position in the plant genome. Other methods to target polynucleotides are set forth in WO 2009/114321 (herein incorporated by reference in its entirety), which describes “custom” meganucleases produced to modify plant genomes, in particular the genome of maize. See, also, Gao et al. (2010) Plant Journal 1:176-187.

[0126] The cells that have been transformed may be grown into plants in accordance with conventional ways. See, for example, McCormick et al. (1986) Plant Cell Reports 5:81-84. These plants may then be grown, and either pollinated with the same transformed strain or different strains, and the resulting progeny having constitutive expression of the desired phenotypic characteristic identified. Two or more generations may be grown to ensure that expression of the desired phenotypic characteristic is stably maintained and inherited and then seeds harvested to ensure expression of the desired phenotypic characteristic has been achieved. In this manner, the present invention provides transformed seed (also referred to as “transgenic seed”) having a polynucleotide of the invention, for example, an expression cassette of the invention, stably incorporated into their genome.

[0127] Additional host cells of interest include, for example, prokaryotes including various strains of E. coli and other microbial strains. Commonly used prokaryotic control sequences which are defined herein to include promoters for transcription initiation, optionally with an operator, along with ribosome binding sequences, include such commonly used promoters as the beta lactamase (penicillinase) and lactose (lac) promoter systems (Chang et al. (1977) Nature 198:1056), the tryptophan (trp) promoter system (Goeddel et al. (1980) Nucleic Acids Res. 8:4057) and the lambda derived P L promoter and N-gene ribosome binding site (Shimatake et al. (1981) Nature 292:128). The inclusion of selection markers in DNA vectors transfected in E coli. is also useful. Examples of such markers include genes specifying resistance to ampicillin, tetracycline, or chloramphenicol.

[0128] The vector is selected to allow introduction into the appropriate host cell. Bacterial vectors are typically of plasmid or phage origin. Appropriate bacterial cells are infected with phage vector particles or transfected with naked phage vector DNA. If a plasmid vector is used, the bacterial cells are transfected with the plasmid vector DNA. Expression systems for expressing a protein of the present invention are available using Bacillus sp. and Salmonella (Palva et al. (1983) Gene 22:229-235); Mosbach et al. (1983) Nature 302:543-545).

[0129] A variety of expression systems for yeast are known to those of skill in the art. Two widely utilized yeasts for production of eukaryotic proteins are Saccharomyces cerevisiae and Pichia pastoris. Vectors, strains, and protocols for expression in Saccharomyces and Pichia are known in the art and available from commercial suppliers. See, for Example, Sherman et al. (1982) Methods in Yeast Genetics, Cold Spring Harbor Laboratory.

### VII. Methods of Use

[0130] A. Methods for Increasing Expression and/or Concentration of at Least One Dicamba Decarboxylase Sequence or an Active Variant or Fragment Therefore in Host Cells

[0131] A method for increasing the activity and/or concentration of a dicamba decarboxylase polypeptide disclosed herein or an active variant or fragment thereof in a host cell, plant, plant cell, plant part, explant, or seed is provided. Methods for assaying for an increase in dicamba decarboxylase activity are discussed in detail elsewhere herein.

[0132] In further embodiments, the concentration/level of the dicamba decarboxylase polypeptide is increased in a host cell, a plant or plant part by at least 10%, 20%, 30%, 40%, 50%, 60%, 70%, 80%, 90%, 100%, 200%, 500%, 1000%, 5000%, or 10,000% relative to an appropriate control host cell, plant, plant part, or cell which did not have the dicamba decarboxylase sequence. In still other embodiments, the level of the dicamba decarboxylase polypeptide in the host cell, plant or plant part is increased by 10, 20, 30, 40, 50, 60, 70, 80, 90, 100 fold or more compared to the level of the native dicamba decarboxylase sequence. Such an increase in the level of the dicamba decarboxylase polypeptide can be achieved in a variety of ways including, for example, by the expression of multiple copies of one or more dicamba decarboxylase polypeptide and/or by employing a promoter to drive higher levels of expression of the sequence.

[0133] In specific embodiments, the polypeptide or the dicamba decarboxylase polynucleotide or active variant or fragment thereof is introduced into the host cell, plant, plant cell, explant or plant part. Subsequently, a host cell or plant cell having the introduced sequence of the invention is selected using methods known to those of skill in the art such as, but not limited to, Southern blot analysis, DNA sequencing, PCR analysis, or phenotypic analysis. When a plant or plant part is employed in the foregoing embodiments, the plant or plant cell is grown under plant forming conditions for a time sufficient to modulate the concentration and/or activity of the dicamba decarboxylase polypeptide in the plant. Plant forming conditions are well known in the art and discussed briefly elsewhere herein.

[0134] In one embodiment, a method of producing a dicamba tolerant host cell or plant cell is provided and comprises transforming a host cell or plant cell with the polynucleotide encoding a dicamba decarboxylase polypeptide or active variant or fragment thereof. In specific embodiments, the method further comprises selecting a host cell or plant cell which is resistant or tolerant to the dicamba.

[0135] B. Methods to Decarboxylate Auxin-Analogs

[0136] Methods and compositions are provided to decarboxylate auxin-analogs using a dicamba decarboxylase or an active variant or fragment thereof. In specific embodiments, an auxin-analog herbicide is used, and the decarboxylation of the auxin-analog herbicide detoxifies the auxin-analog herbicide.

[0137] As used herein, an “auxin-analog herbicide” or “synthetic auxin herbicide” are used interchangeably and comprises any auxinic or growth regulator herbicides, otherwise known as Group 4 herbicides (based on their mode of action), including the acids themselves or their agricultural esters and salts. These types of herbicides mimic or act like the natural plant growth regulators called auxins. The action of auxin-analog herbicide appears to affect cell wall plasticity and nucleic acid metabolism, which can lead to uncontrolled cell division and growth. See, for example, Cox et al. (1994) Journal of Pesticide Reform 14:30-35; Dayan et al. (2010) Weed Science 58:340-350; Davidonis et al. (1982) Plant Physiol 70:357-360; Mithila et al. (2011) Weed Science 59:445-457; Grossmann (2007) Plant Signalling and Behavior 2:421-423, U.S. Pat. No. 7,855,326; US App. Pub. 2012/0178627; US App. Pub. 2011/0124503; and U.S. Pat. No. 7,838,733, each of which is herein incorporated by reference in their entirety. An auxin-analog herbicide derivative includes any metabolic product of the auxin-analog herbicide. Such a metabolic product may or may not retain herbicidal activity.

[0138] Auxin-analog herbicides include the chemical families: phenoxy-carboxylic-acid, pyridine carboxylic acid, benzoic acid, quinoline carboxylic acid, aminocyclopyrachlor (MAT28) and benazolin-ethyl and any of their acids or salts. The structures of various auxin-analog herbicides are set forth in FIG. 13. Phenoxy-carboxylic acid herbicides include (2,4-dichlorophenoxy)acetic acid (otherwise known as 2,4-D); 4-(2,4-dichlorophenoxy)butyric acid (2,4-DB); 2-(2,4-dichlorophenoxy)propanoic acid (2,4-DP), (2,4,5-trichlorophenoxy)acetic acid (2,4,5-T); 2-(2,4,5-Trichlorophenoxy)Propionic Acid (2,4,5-TP); 2-(2,4-dichloro-3-methylphenoxy)-N-phenylpropanamide (clomeprop); (4-chloro-2-methylphenoxy)acetic acid (MCPA); 4-(4-chloro-o-tolyloxy)butyric acid (MCPB); and 2-(4-chloro-2-methylphenoxy)propanoic acid (MCPP).

[0139] Other forms of auxin-analog herbicides include the pyridine carboxylic acid herbicides. Examples include 3,6-dichloro-2-pyridinecarboxylic acid (Clopyralid), 4-amino-3,5,6-trichloro-2-pyridinecarboxylic acid (picloram), (2,4,5-trichlorophenoxy) acetic acid (triclopyr), and 4-amino-3,5-dichloro-6-fluoro-2-pyridyloxyacetic acid (fluoroxypyr).

[0140] Examples of benzoic acids family of auxin-analog herbicides include 3,6-dichloro-o-anisic acid (dicamba) and 3-amino-2,5-dichlorobenzoic acid (choramben), and TBD, as shown in FIG. 14. Dicamba or active derivative thereof is a particularly useful herbicide for use in the methods and compositions disclosed herein.

[0141] The quinoline carboxylic acid family of auxin-analog herbicides includes 3,7-dichloro-8-quinolinecarboxylic acid (quinclorac). This herbicide is unique in that it also will control some grass weeds, unlike the other auxin-analog herbicide which essentially control only broadleaf or dicotyledonous plants. The other herbicide in this category is 7-chloro-3-methyl-8-quinolinecarboxylic acid (quinmerac). In other embodiments, the auxin-analog herbicide comprises aminocyclopyrachlor, aminopyralid benazolin-ethyl, chloramben, clomeprop, clopyralid, dicamba, 2,4-D, 2,4-DB, dichlorprop, fluroxypyr, mecoprop, MCPA, MCPB, 2,3,6-TBA, picloram, triclopyr, quinclorac, or quinmerac. See, for example, WO2010/046422, WO2011/161131, WO2012/033548, and US Application Publications 20110287935, 20100069248, and 20100048399, each of which is herein incorporated by reference in their entirety. Additional auxin-analog herbecides include those set forth in Heap et al. (2013) The International Survey of Herbecide Resistant Weeds. Online. Internet. at www.weedscience.com., the contents of which are herein incorporated by reference.

[0142] While any auxin-analog herbicide can be employed in the methods and compositions disclosed herein, in one embodiment, the auxin-analog herbicide comprises a member of the benzoic acid family of auxin-analog herbicides, a derivative of a benzoic acid auxin-analog herbicide, or a metabolic product of such a compound. Examples of benzoic acids family of the auxin-analog herbicides include 3,6-dichloro-o-anisic acid (dicamba) and 3-amino-2,5-dichlorobenzoic acid (chloramben), and 2, 3, 6-trichlorobenzoic acid (TBD or TCBA), as shown in FIG. 14. The terms “dicamba”, “choramben” and “TBD” include the acids themselves, or their agriculturally acceptable esters and salts.

[0143] As used herein, “dicamba” refers to 3,6-dichloro-o-anisic acid or 3,6-dichloro-2-methoxy benzoic acid (FIG. 14) and its acids and salts. Dicamba salts include, for example, isopropylamine, diglycoamine, dimethylamine, potassium and sodium. Examples of commercial formulations of dicamba include, without limitation, Banvel™ (as DMA salt), Clarity® (as DGA salt, BASF), VEL-58-CS-11™ and Vanquish™ (as DGA salt, BASF).

[0144] A derivative of dicamba is defined as a substituted benzoic acid, and biologically acceptable salts thereof. In specific embodiments, the dicamba derivative has herbicidal activity.

[0145] Derivatives of dicamba further include metabolic products of the herbicide. In specific embodiments, decarboxylation of the dicamba metabolite can further reduce the herbicidal activity of the dicamba metabolite. In other embodiments, the dicamba metabolite does not have herbicidal activity, and the dicamba decarboxylase or active variant or fragment thereof is employed to modify the dicamba by-product, which in some instances finds use in bioremediation as disclosed elsewhere herein.

[0146] Non-limiting examples of dicamba metabolic products include any metabolic product produced when employing a dicamba monooxygenase. Dicamba monooxygenases (DMOs) and the various DMO-mediated dicamba metabolic products are described, for example in, U.S. Pat. No. 8,207,092, which is herein incorporated by reference in its entirety. Such, dicamba metabolic products include 3,6-DCSA, or DCGA (5-0H DCSA, or DC-gentisic acid. In one non-limiting embodiment, the dicamba decarboxylase is employed to decarboxylate 3,6-DCSA.

[0147] Methods and compositions are provided to detoxify an auxin-analog herbicide or derivative or metabolic product thereof. As used herein, “detoxify” or “detoxifying” an auxin-analog herbicide comprises any modification to the auxin-analog herbicide, derivative or metabolic product thereof, which reduces the herbicidal effect of the compound. A “reduced” herbicidal effect comprises any statistically significant decrease in the sensitivity of the plant or plant cell to the modified auxin-analog. The reduced herbicidal activity of a modified auxin-analog herbicide can be assayed in a variety of ways including, for example, assaying for the decreased sensitivity of a plant, a plant cell, or plant explant to the presence of the modified auxin-analog. See, for example, Example 2 provided herein. In such instances, the plant, plant cell, or plant explant will display a decreased sensitivity to the modified auxin-analog when compared to a control plant, plant cell, or plant explant which was contacted with the non-modified auxin-analog herbicide. Thus, in one example, a “reduced herbicidal effect” is demonstrated when plants display the increased tolerance to a modified auxin-analog and a dose/response curve is shifted to the right when compared to when the non-modified auxin-analog herbicide is applied. Such dose/response curves have “dose” plotted on the x-axis and “percentage injury”, “herbicidal effect” etc. plotted on the y-axis.

[0148] In one embodiment, methods and compositions are provided to detoxify dicamba via decarboxylation. The various bi-products of such an enzymatic reaction are set forth in FIG. 1 and discussed in detail elsewhere herein. As shown in Example 4, while the reaction mechanism may not be the same for all dicamba decarboxylases, all dicamba decarboxylases will release a CO2 from the dicamba molecule.

[0149] Thus, in one embodiment, a method for detoxifying an auxin-analog herbicide, derivative or metabolic product thereof is provided. Such methods employ increasing the level of a dicamba decarboxylase polypeptide or an active variant or fragment thereof in a plant, plant cell, plant part, explant, seed and applying to the plant, plant cell or plant part at least one auxin-analog herbicide. In specific embodiments, the auxin-analog herbicide comprises dicamba, derivative or metabolic product thereof.

[0150] In another embodiment, a method of producing an auxin-analog herbicide tolerant host cell (ie., a microbial cell such as E. coli) is provided and comprises introducing into the host cell (ie., the microbial cell, such as E. coli) a polynucleotide encoding a dicamba decarboxylase polypeptide or an active variant or fragment thereof. Microbial host cells expressing such dicamba decarboxylase sequences find use in bioremediation.

[0151] As used herein, “bioremediation” is the use of micro-organism metabolism to remove a contaminating material. In such embodiments, an effective amount of the microbial host expressing the dicamba decarboxylase polypeptide is contacted with a contaminated material (ie., soil) having an auxin-analog herbicide (such as, for example, dicamba). The microbial host detoxifies the auxin-analog herbicide and thereby reduces the level of the contaminant in the material (ie., soil). Such methods can occur either in situ or ex situ. In situ bioremediation involves treating the contaminated material at the site, while ex situ involves the removal of the contaminated material to be treated elsewhere.

[0152] In still further embodiments, the dicamba decarboxylase is employed to decarboxylate any auxin-analog, derivative or metabolic product thereof. In such methods, the dicamba decarboxylate can be found within a host cell or plant cell or alternatively, an effective amount of the dicamba decarboxylase can be applied to a sample containing the auxin-analog substrate. By “contacting” is intended any method whereby an effective amount of the auxin-analog substrate is exposed to the dicamba decarboxylase. By “effective amount” of the dicamba decarboxylase is intended an amount of chemical ligand that is sufficient to allow for the desirable level of decarboxylation of the substrate (i.e., auxin-analog or dicamba or derivative or metabolic product thereof).

[0153] C. Method of Producing Crops and Controlling Weeds

[0154] Methods for controlling weeds in an area of cultivation, preventing the development or the appearance of herbicide resistant weeds in an area of cultivation, producing a crop, and increasing crop safety are provided. The term “controlling,” and derivations thereof, for example, as in “controlling weeds” refers to one or more of inhibiting the growth, germination, reproduction, and/or proliferation of; and/or killing, removing, destroying, or otherwise diminishing the occurrence and/or activity of a weed.

[0155] As used herein, an “area of cultivation” comprises any region in which one desires to grow a plant. Such areas of cultivations include, but are not limited to, a field in which a plant is cultivated (such as a crop field, a sod field, a tree field, a managed forest, a field for culturing fruits and vegetables, etc), a greenhouse, a growth chamber, etc.

[0156] As used herein, by “selectively controlled” it is intended that the majority of weeds in an area of cultivation are significantly damaged or killed, while if crop plants are also present in the field, the majority of the crop plants are not significantly damaged. Thus, a method is considered to selectively control weeds when at least 55%, 60%, 65%, 70%, 75%, 80%, 85%, 90%, 95%, or more of the weeds are significantly damaged or killed, while if crop plants are also present in the field, less than 45%, 40%, 35%, 30%, 25%, 20%, 15%, 10%, 5%, or 1% of the crop plants are significantly damaged or killed.

[0157] Methods provided comprise planting the area of cultivation with a plant or a seed having a heterologous polynucleotide encoding a dicamba decarboxylase polypeptide or an active variant or fragment thereof, and in specific embodiments, applying to the crop, seed, weed and/or area of cultivation thereof an effective amount of a herbicide of interest. It is recognized that the herbicide can be applied before or after the crop is planted in the area of cultivation. Such herbicide applications can include an application of an auxin-analog herbicide including, but not limited to, the various an auxin-analog herbicides discussed elsewhere herein, non-limiting examples appearing in FIG. 14. In specific embodiments, the auxin-analog herbicide comprises dicamba. Generally, the effective amount of herbicide applied to the field is sufficient to selectively control the weeds without significantly affecting the crop.

[0158] “Weed” as used herein refers to a plant which is not desirable in a particular area. Conversely, a “crop plant” as used herein refers to a plant which is desired in a particular area, such as, for example, a maize or soybean plant. Thus, in some embodiments, a weed is a non-crop plant or a non-crop species, while in some embodiments, a weed is a crop species which is sought to be eliminated from a particular area, such as, for example, an inferior and/or non-transgenic soybean plant in a field planted with a plant having the heterologous nucleotide sequence encoding the dicamba decarboxylase polypeptide or an active variant or fragment thereof.

[0159] Further provided is a method for producing a crop by growing a crop plant that is tolerant to an auxin-analog herbicide or derivative thereof (i.e., dicamba or derivative thereof) as a result of being transformed with a heterologous polynucleotide encoding a dicamba decarboxylase polypeptide or an active variant or fragment thereof, under conditions such that the crop plant produces a crop, and harvesting the crop. Preferably, an auxin-analog herbicide or derivative thereof (i.e., dicamba or derivative thereof) is applied to the plant, or in the vicinity of the plant, or in the area of cultivation at a concentration effective to control weeds without preventing the transgenic crop plant from growing and producing the crop. The application of the auxin-analog herbicide can be before planting, or at any time after planting up to and including the time of harvest. The auxin-analog herbicide or derivative thereof can be applied once or multiple times. The timing of the auxin-analog herbicide application, amount applied, mode of application, and other parameters will vary based upon the specific nature of the crop plant and the growing environment. The invention further provides the crop produced by this method.

[0160] Further provided are methods for the propagation of a plant containing a heterologous polynucleotide encoding a dicamba decarboxylase polypeptide or active variant or fragment thereof. The plant can be, for example, a monocot or a dicot. In one aspect, propagation entails crossing a plant containing the heterologous polynucleotide encoding a dicamba decarboxylase polypeptide transgene with a second plant, such that at least some progeny of the cross display auxin-analog herbicide (i.e. dicamba) tolerance.

[0161] The methods of the invention further allow for the development of herbicide applications to be used with the plants having the heterologous polynucleotides encoding the dicamba decarboxylase polypeptides or active variants or fragments thereof. In such methods, the environmental conditions in an area of cultivation are evaluated. Environmental conditions that can be evaluated include, but are not limited to, ground and surface water pollution concerns, intended use of the crop, crop tolerance, soil residuals, weeds present in area of cultivation, soil texture, pH of soil, amount of organic matter in soil, application equipment, and tillage practices. Upon the evaluation of the environmental conditions, an effective amount of a combination of herbicides can be applied to the crop, crop part, seed of the crop or area of cultivation.

[0162] Any herbicide or combination of herbicides can be applied to the plant having the heterologous polynucleotide encoding the dicamba decarboxylase polypeptide or active variant or fragment thereof disclosed herein or transgenic seed derived there from, crop part, or the area of cultivation containing the crop plant. As mentioned elsewhere herein, such plants may further contain a polynucleotide encoding a polypeptide that confers tolerance to dicamba or a derivative thereof via a different mechanism than the dicamba decarboxylase, or the plant may further contain a polynucleotide encoding a polypeptide that confers tolerance to a herbicide other than dicamba.

[0163] By “treated with a combination of” or “applying a combination of” herbicides to a crop, area of cultivation or field it is intended that a particular field, crop or weed is treated with each of the herbicides and/or chemicals indicated to be part of the combination so that a desired effect is achieved, i.e., so that weeds are selectively controlled while the crop is not significantly damaged. The application of each herbicide and/or chemical may be simultaneous or the applications may be at different times (sequential), so long as the desired effect is achieved. Furthermore, the application can occur prior to the planting of the crop.

[0164] Classifications of herbicides (i.e., the grouping of herbicides into classes and subclasses) are well-known in the art and include classifications by HRAC (Herbicide Resistance Action Committee) and WSSA (the Weed Science Society of America) (see also, Retzinger and Mallory-Smith (1997) Weed Technology 11: 384-393). An abbreviated version of the HRAC classification (with notes regarding the corresponding WSSA group) is set forth below in Table 1.

[0165] Herbicides can be classified by their mode of action and/or site of action and can also be classified by the time at which they are applied (e.g., preemergent or postemergent), by the method of application (e.g., foliar application or soil application), or by how they are taken up by or affect the plant or by their structure. “Mode of action” generally refers to the metabolic or physiological process within the plant that the herbicide inhibits or otherwise impairs, whereas “site of action” generally refers to the physical location or biochemical site within the plant where the herbicide acts or directly interacts. Herbicides can be classified in various ways, including by mode of action and/or site of action (see, e.g., Table 1).

[0166] In specific embodiments, the plants of the present invention can tolerate treatment with different types of herbicides (i.e., herbicides having different modes of action and/or different sites of action) thereby permitting improved weed management strategies that are recommended in order to reduce the incidence and prevalence of herbicide-tolerant weeds.

[0167] In still further methods, an auxin-analog herbicide can be applied alone or in combination with another herbicide of interest and can be applied to the plants having the heterologous polynucleotide encoding the dicamba decarboxylase polypeptide or active variant or fragment thereof or their area of cultivation.

[0168] Additional herbicide treatment that can be applied over the plants or seeds having the heterologous polynucleotide encoding the dicamba decarboxylate polypeptide or an active variant or fragment thereof include, but are not limited to: acetochlor, acifluorfen and its sodium salt, aclonifen, acrolein (2-propenal), alachlor, alloxydim, ametryn, amicarbazone, amidosulfuron, aminopyralid, aminocyclopyrachlor, amitrole, ammonium sulfamate, anilofos, asulam, atrazine, azimsulfuron, beflubutamid, benazolin, benazolin-ethyl, bencarbazone, benfluralin, benfuresate, bensulfuron-methyl, bensulide, bentazone, benzobicyclon, benzofenap, bifenox, bilanafos, bispyribac and its sodium salt, bromacil, bromobutide, bromofenoxim, bromoxynil, bromoxynil octanoate, butachlor, butafenacil, butamifos, butralin, butroxydim, butylate, cafenstrole, carbetamide, carfentrazone-ethyl, catechin, chlomethoxyfen, chloramben, chlorbromuron, chlorflurenol-methyl, chloridazon, chlorimuron-ethyl, chlorotoluron, chlorpropham, chlorsulfuron, chlorthal-dimethyl, chlorthiamid, cinidon-ethyl, cinmethylin, cinosulfuron, clethodim, clodinafop-propargyl, clomazone, clomeprop, clopyralid, clopyralid-olamine, cloransulam-methyl, CUH-35 (2-methoxyethyl 2-[[[4-chloro-2-fluoro-5-[(1-methyl-2-propynyl)oxy]phenyl](3-fluorobenzoyl)amino]carbonyl]-1-cyclohexene-1-carboxylate), cumyluron, cyanazine, cycloate, cyclosulfamuron, cycloxydim, cyhalofop-butyl, 2,4-D and its butotyl, butyl, isoctyl and isopropyl esters and its dimethylammonium, diolamine and trolamine salts, daimuron, dalapon, dalapon-sodium, dazomet, 2,4-DB and its dimethylammonium, potassium and sodium salts, desmedipham, desmetryn, dicamba and its diglycolammonium, dimethylammonium, potassium and sodium salts, dichlobenil, dichlorprop, diclofop-methyl, diclosulam, difenzoquat metilsulfate, diflufenican, diflufenzopyr, dimefuron, dimepiperate, dimethachlor, dimethametryn, dimethenamid, dimethenamid-P, dimethipin, dimethylarsinic acid and its sodium salt, dinitramine, dinoterb, diphenamid, diquat dibromide, dithiopyr, diuron, DNOC, endothal, EPTC, esprocarb, ethalfluralin, ethametsulfuron-methyl, ethofumesate, ethoxyfen, ethoxysulfuron, etobenzanid, fenoxaprop-ethyl, fenoxaprop-P-ethyl, fentrazamide, fenuron, fenuron-TCA, flamprop-methyl, flamprop-M-isopropyl, flamprop-M-methyl, flazasulfuron, florasulam, fluazifop-butyl, fluazifop-P-butyl, flucarbazone, flucetosulfuron, fluchloralin, flufenacet, flufenpyr, flufenpyr-ethyl, flumetsulam, flumiclorac-pentyl, flumioxazin, fluometuron, fluoroglycofen-ethyl, flupyrsulfuron-methyl and its sodium salt, flurenol, flurenol-butyl, fluridone, flurochloridone, fluroxypyr, flurtamone, fluthiacet-methyl, fomesafen, foramsulfuron, fosamine-ammonium, glufosinate, glufosinate-ammonium, glyphosate and its salts such as ammonium, isopropylammonium, potassium, sodium (including sesquisodium) and trimesium (alternatively named sulfosate) (See, WO2007/024782, herein incorporated by reference in its entirety), halosulfuron-methyl, haloxyfop-etotyl, haloxyfop-methyl, hexazinone, HOK-201 (N-(2,4-difluorophenyl)-1,5-dihydro-N-(1-methylethyl)-5-oxo-1-[(tetrahydro-2H-pyran-2-yOmethyl]-4H-1,2,4-triazole-4-carboxamide), imazamethabenz-methyl, imazamox, imazapic, imazapyr, imazaquin, imazaquin-ammonium, imazethapyr, imazethapyr-ammonium, imazosulfuron, indanofan, iodosulfuron-methyl, ioxynil, ioxynil octanoate, ioxynil-sodium, isoproturon, isouron, isoxaben, isoxaflutole, pyrasulfotole, lactofen, lenacil, linuron, maleic hydrazide, MCPA and its salts (e.g., MCPA-dimethylammonium, MCPA-potassium and MCPA-sodium, esters (e.g., MCPA-2-ethylhexyl, MCPA-butotyl) and thioesters (e.g., MCPA-thioethyl), MCPB and its salts (e.g., MCPB-sodium) and esters (e.g., MCPB-ethyl), mecoprop, mecoprop-P, mefenacet, mefluidide, mesosulfuron-methyl, mesotrione, metam-sodium, metamifop, metamitron, metazachlor, methabenzthiazuron, methylarsonic acid and its calcium, monoammonium, monosodium and disodium salts, methyldymron, metobenzuron, metobromuron, metolachlor, S-metholachlor, metosulam, metoxuron, metribuzin, metsulfuron-methyl, molinate, monolinuron, naproanilide, napropamide, naptalam, neburon, nicosulfuron, norflurazon, orbencarb, oryzalin, oxadiargyl, oxadiazon, oxasulfuron, oxaziclomefone, oxyfluorfen, paraquat dichloride, pebulate, pelargonic acid, pendimethalin, penoxsulam, pentanochlor, pentoxazone, perfluidone, pethoxyamid, phenmedipham, picloram, picloram-potassium, picolinafen, pinoxaden, piperofos, pretilachlor, primisulfuron-methyl, prodiamine, profoxydim, prometon, prometryn, propachlor, propanil, propaquizafop, propazine, propham, propisochlor, propoxycarbazone, propyzamide, prosulfocarb, prosulfuron, pyraclonil, pyraflufen-ethyl, pyrasulfotole, pyrazogyl, pyrazolynate, pyrazoxyfen, pyrazosulfuron-ethyl, pyribenzoxim, pyributicarb, pyridate, pyriftalid, pyriminobac-methyl, pyrimisulfan, pyrithiobac, pyrithiobac-sodium, pyroxsulam, quinclorac, quinmerac, quinoclamine, quizalofop-ethyl, quizalofop-P-ethyl, quizalofop-P-tefuryl, rimsulfuron, sethoxydim, siduron, simazine, simetryn, sulcotrione, sulfentrazone, sulfometuron-methyl, sulfosulfuron, 2,3,6-TBA, TCA, TCA-sodium, tebutam, tebuthiuron, tefuryltrione, tembotrione, tepraloxydim, terbacil, terbumeton, terbuthylazine, terbutryn, thenylchlor, thiazopyr, thiencarbazone, thifensulfuron-methyl, thiobencarb, tiocarbazil, topramezone, tralkoxydim, tri-allate, triasulfuron, triaziflam, tribenuron-methyl, triclopyr, triclopyr-butotyl, triclopyr-triethylammonium, tridiphane, trietazine, trifloxysulfuron, trifluralin, triflusulfuron-methyl, tritosulfuron and vernolate.

[0169] Additional herbicides include those that are applied over plants having homogentisate solanesyltransferase (HST) polypeptide such as those described in WO2010029311(A2), herein incorporate by reference it its entirety.

[0170] Other suitable herbicides and agricultural chemicals are known in the art, such as, for example, those described in WO 2005/041654. Other herbicides also include bioherbicides such as Alternaria destruens Simmons, Colletotrichum gloeosporiodes (Penz.) Penz. & Sacc., Drechsiera monoceras (MTB-951), Myrothecium verrucaria (Albertini & Schweinitz) Ditmar: Fries, Phytophthora palmivora (Butl.) Butl. and Puccinia thlaspeos Schub. Combinations of various herbicides can result in a greater-than-additive (i.e., synergistic) effect on weeds and/or a less-than-additive effect (i.e. safening) on crops or other desirable plants. In certain instances, combinations of auxin-analog herbicides with other herbicides having a similar spectrum of control but a different mode of action will be particularly advantageous for preventing the development of resistant weeds.

[0171] The time at which a herbicide is applied to an area of interest (and any plants therein) may be important in optimizing weed control. The time at which a herbicide is applied may be determined with reference to the size of plants and/or the stage of growth and/or development of plants in the area of interest, e.g., crop plants or weeds growing in the area.

[0172] Ranges of the effective amounts of herbicides can be found, for example, in various publications from University Extension services. See, for example, Bernards et al. (2006) Guide for Weed Management in Nebraska (www.ianrpubs.url.edu/sendlt/ec130); Regher et al. (2005) Chemical Weed Control for Fields Crops, Pastures, Rangeland, and Noncropland, Kansas State University Agricultural Extension Station and Corporate Extension Service; Zollinger et al. (2006) North Dakota Weed Control Guide, North Dakota Extension Service, and the Iowa State University Extension at www.weeds.iastate.edu, each of which is herein incorporated by reference in its entirety.

[0173] Many plant species can be controlled (i.e., killed or damaged) by the herbicides described herein. Accordingly, the methods of the invention are useful in controlling these plant species where they are undesirable (i.e., where they are weeds). These plant species include crop plants as well as species commonly considered weeds, including but not limited to species such as: blackgrass (Alopecurus myosuroides), giant foxtail (Setaria faberi), large crabgrass (Digitaria sanguinalis), Surinam grass (Brachiaria decumbens), wild oat (Avena fatua), common cocklebur (Xanthium pensylvanicum), common lambsquarters (Chenopodium album), morning glory (Ipomoea coccinea), pigweed (Amaranthus spp.), common waterhemp (Amaranthus tuberculatus), velvetleaf (Abutilion theophrasti), common barnyardgrass (Echinochloa crus-galli), bermudagrass (Cynodon dactylon), downy brome (Bromus tectorum), goosegrass (Eleucine indica), green foxtail (Setaria viridis), Italian ryegrass (Lolium multflorum), Johnsongrass (Sorghum halepense), lesser canarygrass (Phalaris minor), windgrass (Apera spica-venti), wooly cupgrass (Erichloa villosa), yellow nutsedge (Cyperus esculentus), common chickweed (Stellaria media), common ragweed (Ambrosia artemisiifolia), Kochia scoparia, horseweed (Conyza canadensis), rigid ryegrass (Lolium rigidum), goosegrass (Eleucine indica), hairy fleabane (Conyza bonariensis), buckhorn plantain (Plantago lanceolata), tropical spiderwort (Commelina benghalensis), field bindweed (Convolvulus arvensis), purple nutsedge (Cyperus rotundus), redvine (Brunnichia ovata), hemp sesbania (Sesbania exaltata), sicklepod (Senna obtusifolia), Texas blueweed (Helianthus ciliaris), and Devil's claws (Proboscidea louisianica). In other embodiments, the weed comprises a herbicide-resistant ryegrass, for example, a glyphosate resistant ryegrass, a paraquat resistant ryegrass, a ACCase-inhibitor resistant ryegrass, and a non-selective herbicide resistant ryegrass.

[0174] In some embodiments, a plant having the heterologous polynucleotide encoding the dicamba decarboxylase polypeptide or an active variant or fragment thereof is not significantly damaged by treatment with an auxin-analog herbicide (i.e., dicamba) applied to that plant, whereas an appropriate control plant is significantly damaged by the same treatment.

[0175] Generally, an auxin-analog herbicide (i.e., dicamba) is applied to a particular field (and any plants growing in it) no more than 1, 2, 3, 4, 5, 6, 7, or 8 times a year, or no more than 1, 2, 3, 4, or 5 times per growing season. Thus, methods of the invention encompass applications of herbicide which are “preemergent,” “postemergent,” “preplant incorporation” and/or which involve seed treatment prior to planting.

[0176] In one embodiment, methods are provided for coating seeds. The methods comprise coating a seed with an effective amount of a herbicide or a combination of herbicides (as disclosed elsewhere herein). The seeds can then be planted in an area of cultivation. Further provided are seeds having a coating comprising an effective amount of a herbicide or a combination of herbicides (as disclosed elsewhere herein). In other embodiments, the seeds can be coated with at least one fungicide and/or at least one insecticide and/or at least one herbicide or any combination thereof.

[0177] “Preemergent” refers to a herbicide which is applied to an area of interest (e.g., a field or area of cultivation) before a plant emerges visibly from the soil. “Postemergent” refers to a herbicide which is applied to an area after a plant emerges visibly from the soil. In some instances, the terms “preemergent” and “postemergent” are used with reference to a weed in an area of interest, and in some instances these terms are used with reference to a crop plant in an area of interest. When used with reference to a weed, these terms may apply to only a particular type of weed or species of weed that is present or believed to be present in the area of interest. While any herbicide may be applied in a preemergent and/or postemergent treatment, some herbicides are known to be more effective in controlling a weed or weeds when applied either preemergence or postemergence. For example, rimsulfuron has both preemergence and postemergence activity, while other herbicides have predominately preemergence (metolachlor) or postemergence (glyphosate) activity. These properties of particular herbicides are known in the art and are readily determined by one of skill in the art. Further, one of skill in the art would readily be able to select appropriate herbicides and application times for use with the transgenic plants of the invention and/or on areas in which transgenic plants of the invention are to be planted. “Preplant incorporation” involves the incorporation of compounds into the soil prior to planting.

[0178] Thus, improved methods of growing a crop and/or controlling weeds such as, for example, “pre-planting burn down,” are provided wherein an area is treated with herbicides prior to planting the crop of interest in order to better control weeds. The invention also provides methods of growing a crop and/or controlling weeds which are “no-till” or “low-till” (also referred to as “reduced tillage”). In such methods, the soil is not cultivated or is cultivated less frequently during the growing cycle in comparison to traditional methods; these methods can save costs that would otherwise be incurred due to additional cultivation, including labor and fuel costs.

[0179] The term “safener” refers to a substance that when added to a herbicide formulation eliminates or reduces the phytotoxic effects of the herbicide to certain crops. One of ordinary skill in the art would appreciate that the choice of safener depends, in part, on the crop plant of interest and the particular herbicide or combination of herbicides. Exemplary safeners suitable for use with the presently disclosed herbicide compositions include, but are not limited to, those disclosed in U.S. Pat. Nos. 4,808,208; 5,502,025; 6,124,240 and U.S. Patent Application Publication Nos. 2006/0148647; 2006/0030485; 2005/0233904; 2005/0049145; 2004/0224849; 2004/0224848; 2004/0224844; 2004/0157737; 2004/0018940; 2003/0171220; 2003/0130120; 2003/0078167, the disclosures of which are incorporated herein by reference in their entirety. The methods of the invention can involve the use of herbicides in combination with herbicide safeners such as benoxacor, BCS (1-bromo-4-[(chloromethyl)sulfonyl]benzene), cloquintocet-mexyl, cyometrinil, dichlormid, 2-(dichloromethyl)-2-methyl-1,3-dioxolane (MG 191), fenchlorazole-ethyl, fenclorim, flurazole, fluxofenim, furilazole, isoxadifen-ethyl, mefenpyr-diethyl, methoxyphenone ((4-methoxy-3-methylphenyl)(3-methylphenyl)-methanone), naphthalic anhydride (1,8-naphthalic anhydride) and oxabetrinil to increase crop safety. Antidotally effective amounts of the herbicide safeners can be applied at the same time as the compounds of this invention, or applied as seed treatments. Therefore an aspect of methods disclosed herein relates to the use of a mixture comprising an auxin-analog herbicide, at least one other herbicide, and an antidotally effective amount of a herbicide safener.

[0180] Seed treatment is useful for selective weed control, because it physically restricts antidoting to the crop plants. Therefore in one embodiment, a method for selectively controlling the growth of weeds in a field comprising treating the seed from which the crop is grown with an antidotally effective amount of safener and treating the field with an effective amount of herbicide to control weeds.

[0181] An antidotally effective amount of a safener is present where a desired plant is treated with the safener so that the effect of a herbicide on the plant is decreased in comparison to the effect of the herbicide on a plant that was not treated with the safener; generally, an antidotally effective amount of safener prevents damage or severe damage to the plant treated with the safener. One of skill in the art is capable of determining whether the use of a safener is appropriate and determining the dose at which a safener should be administered to a crop.

[0182] As used herein, an “adjuvant” is any material added to a spray solution or formulation to modify the action of an agricultural chemical or the physical properties of the spray solution. See, for example, Green and Foy (2003) “Adjuvants: Tools for Enhancing Herbicide Performance,” in Weed Biology and Management, ed. Inderjit (Kluwer Academic Publishers, The Netherlands). Adjuvants can be categorized or subclassified as activators, acidifiers, buffers, additives, adherents, antiflocculants, antifoamers, defoamers, antifreezes, attractants, basic blends, chelating agents, cleaners, colorants or dyes, compatibility agents, cosolvents, couplers, crop oil concentrates, deposition agents, detergents, dispersants, drift control agents, emulsifiers, evaporation reducers, extenders, fertilizers, foam markers, formulants, inerts, humectants, methylated seed oils, high load COCs, polymers, modified vegetable oils, penetrators, repellants, petroleum oil concentrates, preservatives, rainfast agents, retention aids, solubilizers, surfactants, spreaders, stickers, spreader stickers, synergists, thickeners, translocation aids, uv protectants, vegetable oils, water conditioners, and wetting agents.

[0183] In addition, methods of the invention can comprise the use of a herbicide or a mixture of herbicides, as well as, one or more other insecticides, fungicides, nematocides, bactericides, acaricides, growth regulators, chemosterilants, semiochemicals, repellents, attractants, pheromones, feeding stimulants or other biologically active compounds or entomopathogenic bacteria, virus, or fungi to form a multi-component mixture giving an even broader spectrum of agricultural protection. Examples of such agricultural protectants which can be used in methods of the invention include: insecticides such as abamectin, acephate, acetamiprid, amidoflumet (S-1955), avermectin, azadirachtin, azinphos-methyl, bifenthrin, bifenazate, buprofezin, carbofuran, cartap, chlorfenapyr, chlorfluazuron, chlorpyrifos, chlorpyrifos-methyl, chromafenozide, clothianidin, cyflumetofen, cyfluthrin, beta-cyfluthrin, cyhalothrin, lambda-cyhalothrin, cypermethrin, cyromazine, deltamethrin, diafenthiuron, diazinon, dieldrin, diflubenzuron, dimefluthrin, dimethoate, dinotefuran, diofenolan, emamectin, endosulfan, esfenvalerate, ethiprole, fenothiocarb, fenoxycarb, fenpropathrin, fenvalerate, fipronil, flonicamid, flubendiamide, flucythrinate, tau-fluvalinate, flufenerim (UR-50701), flufenoxuron, fonophos, halofenozide, hexaflumuron, hydramethylnon, imidacloprid, indoxacarb, isofenphos, lufenuron, malathion, metaflumizone, metaldehyde, methamidophos, methidathion, methomyl, methoprene, methoxychlor, metofluthrin, monocrotophos, methoxyfenozide, nitenpyram, nithiazine, novaluron, noviflumuron (XDE-007), oxamyl, parathion, parathion-methyl, permethrin, phorate, phosalone, phosmet, phosphamidon, pirimicarb, profenofos, profluthrin, pymetrozine, pyrafluprole, pyrethrin, pyridalyl, pyriprole, pyriproxyfen, rotenone, ryanodine, spinosad, spirodiclofen, spiromesifen (BSN 2060), spirotetramat, sulprofos, tebufenozide, teflubenzuron, tefluthrin, terbufos, tetrachlorvinphos, thiacloprid, thiamethoxam, thiodicarb, thiosultap-sodium, tralomethrin, triazamate, trichlorfon and triflumuron; fungicides such as acibenzolar, aldimorph, amisulbrom, azaconazole, azoxystrobin, benalaxyl, benomyl, benthiavalicarb, benthiavalicarb-isopropyl, binomial, biphenyl, bitertanol, blasticidin-S, Bordeaux mixture (Tribasic copper sulfate), boscalid/nicobifen, bromuconazole, bupirimate, buthiobate, carboxin, carpropamid, captafol, captan, carbendazim, chloroneb, chlorothalonil, chlozolinate, clotrimazole, copper oxychloride, copper salts such as copper sulfate and copper hydroxide, cyazofamid, cyflunamid, cymoxanil, cyproconazole, cyprodinil, dichlofluanid, diclocymet, diclomezine, dicloran, diethofencarb, difenoconazole, dimethomorph, dimoxystrobin, diniconazole, diniconazole-M, dinocap, discostrobin, dithianon, dodemorph, dodine, econazole, etaconazole, edifenphos, epoxiconazole, ethaboxam, ethirimol, ethridiazole, famoxadone, fenamidone, fenarimol, fenbuconazole, fencaramid, fenfuram, fenhexamide, fenoxanil, fenpiclonil, fenpropidin, fenpropimorph, fentin acetate, fentin hydroxide, ferbam, ferfurazoate, ferimzone, fluazinam, fludioxonil, flumetover, fluopicolide, fluoxastrobin, fluquinconazole, fluquinconazole, flusilazole, flusulfamide, flutolanil, flutriafol, folpet, fosetyl-aluminum, fuberidazole, furalaxyl, furametapyr, hexaconazole, hymexazole, guazatine, imazalil, imibenconazole, iminoctadine, iodicarb, ipconazole, iprobenfos, iprodione, iprovalicarb, isoconazole, isoprothiolane, kasugamycin, kresoxim-methyl, mancozeb, mandipropamid, maneb, mapanipyrin, mefenoxam, mepronil, metalaxyl, metconazole, methasulfocarb, metiram, metominostrobin/fenominostrobin, mepanipyrim, metrafenone, miconazole, myclobutanil, neo-asozin (ferric methanearsonate), nuarimol, octhilinone, ofurace, orysastrobin, oxadixyl, oxolinic acid, oxpoconazole, oxycarboxin, paclobutrazol, penconazole, pencycuron, penthiopyrad, perfurazoate, phosphonic acid, phthalide, picobenzamid, picoxystrobin, polyoxin, probenazole, prochloraz, procymidone, propamocarb, propamocarb-hydrochloride, propiconazole, propineb, proquinazid, prothioconazole, pyraclostrobin, pryazophos, pyrifenox, pyrimethanil, pyrifenox, pyrolnitrine, pyroquilon, quinconazole, quinoxyfen, quintozene, silthiofam, simeconazole, spiroxamine, streptomycin, sulfur, tebuconazole, techrazene, tecloftalam, tecnazene, tetraconazole, thiabendazole, thifluzamide, thiophanate, thiophanate-methyl, thiram, tiadinil, tolclofos-methyl, tolyfluanid, triadimefon, triadimenol, triarimol, triazoxide, tridemorph, trimoprhamide tricyclazole, trifloxystrobin, triforine, triticonazole, uniconazole, validamycin, vinclozolin, zineb, ziram, and zoxamide; nematocides such as aldicarb, oxamyl and fenamiphos; bactericides such as streptomycin; acaricides such as amitraz, chinomethionat, chlorobenzilate, cyhexatin, dicofol, dienochlor, etoxazole, fenazaquin, fenbutatin oxide, fenpropathrin, fenpyroximate, hexythiazox, propargite, pyridaben and tebufenpyrad; and biological agents including entomopathogenic bacteria, such as Bacillus thuringiensis subsp. Aizawai, Bacillus thuringiensis subsp. Kurstaki, and the encapsulated delta-endotoxins of Bacillus thuringiensis (e.g., Cellcap, MPV, MPVII); entomopathogenic fungi, such as green muscardine fungus; and entomopathogenic virus including baculovirus, nucleopolyhedro virus (NPV) such as HzNPV, AfNPV; and granulosis virus (GV) such as CpGV.

[0184] The methods of controlling weeds can further include the application of a biologically effective amount of a herbicide of interest or a mixture of herbicides, and an effective amount of at least one additional biologically active compound or agent and can further comprise at least one of a surfactant, a solid diluent or a liquid diluent. Examples of such biologically active compounds or agents are: insecticides such as abamectin, acephate, acetamiprid, amidoflumet (S-1955), avermectin, azadirachtin, azinphos-methyl, bifenthrin, binfenazate, buprofezin, carbofuran, chlorfenapyr, chlorfluazuron, chlorpyrifos, chlorpyrifos-methyl, chromafenozide, clothianidin, cyfluthrin, beta-cyfluthrin, cyhalothrin, lambda-cyhalothrin, cypermethrin, cyromazine, deltamethrin, diafenthiuron, diazinon, diflubenzuron, dimethoate, diofenolan, emamectin, endosulfan, esfenvalerate, ethiprole, fenothicarb, fenoxycarb, fenpropathrin, fenvalerate, fipronil, flonicamid, flucythrinate, tau-fluvalinate, flufenerim (UR-50701), flufenoxuron, fonophos, halofenozide, hexaflumuron, imidacloprid, indoxacarb, isofenphos, lufenuron, malathion, metaldehyde, methamidophos, methidathion, methomyl, methoprene, methoxychlor, monocrotophos, methoxyfenozide, nithiazin, novaluron, noviflumuron (XDE-007), oxamyl, parathion, parathion-methyl, permethrin, phorate, phosalone, phosmet, phosphamidon, pirimicarb, profenofos, pymetrozine, pyridalyl, pyriproxyfen, rotenone, spinosad, spiromesifin (BSN 2060), sulprofos, tebufenozide, teflubenzuron, tefluthrin, terbufos, tetrachlorvinphos, thiacloprid, thiamethoxam, thiodicarb, thiosultap-sodium, tralomethrin, trichlorfon and triflumuron; fungicides such as acibenzolar, azoxystrobin, benomyl, blasticidin-S, Bordeaux mixture (tribasic copper sulfate), bromuconazole, carpropamid, captafol, captan, carbendazim, chloroneb, chlorothalonil, copper oxychloride, copper salts, cyflufenamid, cymoxanil, cyproconazole, cyprodinil, (S)-3,5-dichloro-N-(3-chloro-1-ethyl-1-methyl-2-oxopropyl)-4-methylbenzamide (RH 7281), diclocymet (S-2900), diclomezine, dicloran, difenoconazole, (S)-3,5-dihydro-5-methyl-2-(methylthio)-5-phenyl-3-(phenyl-amino)-4H-imidazol-4-one (RP 407213), dimethomorph, dimoxystrobin, diniconazole, diniconazole-M, dodine, edifenphos, epoxiconazole, famoxadone, fenamidone, fenarimol, fenbuconazole, fencaramid (SZX0722), fenpiclonil, fenpropidin, fenpropimorph, fentin acetate, fentin hydroxide, fluazinam, fludioxonil, flumetover (RPA 403397), flumorf/flumorlin (SYP-L190), fluoxastrobin (HEC 5725), fluquinconazole, flusilazole, flutolanil, flutriafol, folpet, fosetyl-aluminum, furalaxyl, furametapyr (S-82658), hexaconazole, ipconazole, iprobenfos, iprodione, isoprothiolane, kasugamycin, kresoxim-methyl, mancozeb, maneb, mefenoxam, mepronil, metalaxyl, metconazole, metomino-strobin/fenominostrobin (SSF-126), metrafenone (AC375839), myclobutanil, neo-asozin (ferric methane-arsonate), nicobifen (BAS 510), orysastrobin, oxadixyl, penconazole, pencycuron, probenazole, prochloraz, propamocarb, propiconazole, proquinazid (DPX-KQ926), prothioconazole (JAU 6476), pyrifenox, pyraclostrobin, pyrimethanil, pyroquilon, quinoxyfen, spiroxamine, sulfur, tebuconazole, tetraconazole, thiabendazole, thifluzamide, thiophanate-methyl, thiram, tiadinil, triadimefon, triadimenol, tricyclazole, trifloxystrobin, triticonazole, validamycin and vinclozolin; nematocides such as aldicarb, oxamyl and fenamiphos; bactericides such as streptomycin; acaricides such as amitraz, chinomethionat, chlorobenzilate, cyhexatin, dicofol, dienochlor, etoxazole, fenazaquin, fenbutatin oxide, fenpropathrin, fenpyroximate, hexythiazox, propargite, pyridaben and tebufenpyrad; and biological agents including entomopathogenic bacteria, such as Bacillus thuringiensis subsp. Aizawai, Bacillus thuringiensis subsp. Kurstaki, and the encapsulated delta-endotoxins of Bacillus thuringiensis (e.g., Cellcap, MPV, MPVII); entomopathogenic fungi, such as green muscardine fungus; and entomopathogenic virus including baculovirus, nucleopolyhedro virus (NPV) such as HzNPV, AfNPV; and granulosis virus (GV) such as CpGV. Methods of the invention may also comprise the use of plants genetically transformed to express proteins (such as Bacillus thuringiensis delta-endotoxins) toxic to invertebrate pests. In such embodiments, the effect of exogenously applied invertebrate pest control compounds may be synergistic with the expressed toxin proteins. General references for these agricultural protectants include The Pesticide Manual, 13th Edition, C. D. S. Tomlin, Ed., British Crop Protection Council, Farnham, Surrey, U. K., 2003 and The BioPesticide Manual, 2^{nd} Edition, L. G. Copping, Ed., British Crop Protection Council, Farnham, Surrey, U. K., 2001. In certain instances, combinations with other invertebrate pest control compounds or agents having a similar spectrum of control but a different mode of action will be particularly advantageous for resistance management. Thus, compositions of the present invention can further comprise a biologically effective amount of at least one additional invertebrate pest control compound or agent having a similar spectrum of control but a different mode of action. Contacting a plant genetically modified to express a plant protection compound (e.g., protein) or the locus of the plant with a biologically effective amount of a compound of this invention can also provide a broader spectrum of plant protection and be advantageous for resistance management.

[0185] Thus, methods of controlling weeds can employ a herbicide or herbicide combination and may further comprise the use of insecticides and/or fungicides, and/or other agricultural chemicals such as fertilizers. The use of such combined treatments of the invention can broaden the spectrum of activity against additional weed species and suppress the proliferation of any resistant biotypes.

[0186] Methods can further comprise the use of plant growth regulators such as aviglycine, N-(phenylmethyl)-1H-purin-6-amine, ethephon, epocholeone, gibberellic acid, gibberellin A₄ and A₇, hatpin protein, mepiquat chloride, prohexadione calcium, prohydrojasmon, sodium nitrophenolate and trinexapac-methyl, and plant growth modifying organisms such as Bacillus cereus strain BP01.

### IIX. Method of Detection

[0187] Methods for detecting a dicamba decarboxylase polypeptide or an active variant or fragment thereof are provided. Such methods comprise analyzing samples, including environmental samples or plant tissues to detect such polypeptides or the polynucleotides encoding the same. The detection methods can directly assay for the presence of the dicamba decarboxylase polypeptide or polynucleotide or the detection methods can indirectly assay for the sequences by assaying the phenotype of the host cell, plant, plant cell or plant explant expressing the sequence.

[0188] In one embodiment, the dicamba decarboxylase polypeptide is detected in the sample or the plant tissue using an immunoassay comprising an antibody or antibodies that specifically recognizes a dicamba decarboxylase polypeptide or active variant or fragment thereof. In specific embodiments, the antibody or antibodies which are used are raised to a dicamba decarboxylase polypeptide or active variant or fragment thereof as disclosed herein.

[0189] By “specifically or selectively binds” is intended that the binding agent has a binding affinity for a given dicamba decarboxylase polypeptide or fragment or variant disclosed herein, which is greater than 10%, 9%, 8%, 7%, 6%, 5%, 4%, 3%, 2% or 1% of the binding affinity for a known dicamba decarboxylase sequence. One of skill will be aware of the proper controls that are needed to carry out such a determination.

[0190] By “antibodies that specifically bind” is intended that the antibodies will not substantially cross react with another polypeptide. By “not substantially cross react” is intended that the antibody or fragment thereof has a binding affinity for the other polypeptide which is less than 10%, less than 5%, or less than 1%, of the binding affinity for the dicamba decarboxylase polypeptide or active fragment or variant thereof.

[0191] In still other embodiments, the dicamba decarboxylase polypeptide or active variant or fragment thereof can be detected in a sample or a plant tissue by detecting the presence of a polynucleotide encoding any of the various dicamba decarboxylase polypeptides or active variants and fragments thereof. In one embodiment, the detection method comprises assaying the sample or the plant tissue using PCR amplification.

[0192] As used herein, “primers” are isolated polynucleotides that are annealed to a complementary target DNA strand by nucleic acid hybridization to form a hybrid between the primer and the target DNA strand, then extended along the target DNA strand by a polymerase, e.g., a DNA polymerase. Primer pairs of the invention refer to their use for amplification of a target polynucleotide, e.g., by the polymerase chain reaction (PCR) or other conventional nucleic-acid amplification methods. “PCR” or “polymerase chain reaction” is a technique used for the amplification of specific DNA segments (see, U.S. Pat. Nos. 4,683,195 and 4,800,159; herein incorporated by reference in their entirety).

[0193] Probes and primers are of sufficient nucleotide length to bind to the target DNA sequence and specifically detect and/or identify a polynucleotide encoding a dicamba decarboxylase polypeptide or active variant or fragment thereof as described elsewhere herein. It is recognized that the hybridization conditions or reaction conditions can be determined by the operator to achieve this result. This length may be of any length that is of sufficient length to be useful in a detection method of choice. Such probes and primers can hybridize specifically to a target sequence under high stringency hybridization conditions. Probes and primers according to embodiments of the present invention may have complete DNA sequence identity of contiguous nucleotides with the target sequence, although probes differing from the target DNA sequence and that retain the ability to specifically detect and/or identify a target DNA sequence may be designed by conventional methods. Accordingly, probes and primers can share about 80%, 85%, 90%, 91%, 92%, 93%, 94%, 95%, 96%, 97%, 98%, 99% or greater sequence identity or complementarity to the target polynucleotide.

[0194] Methods for preparing and using probes and primers are described, for example, in Molecular Cloning: A Laboratory Manual, 2.sup.nd ed, vol. 1-3, ed. Sambrook et al., Cold Spring Harbor Laboratory Press, Cold Spring Harbor, N. Y. 1989 (hereinafter, “Sambrook et al., 1989”); Current Protocols in Molecular Biology, ed. Ausubel et al., Greene Publishing and Wiley-Interscience, New York, 1992 (with periodic updates) (hereinafter, “Ausubel et al., 1992”); and Innis et al., PCR Protocols: A Guide to Methods and Applications, Academic Press: San Diego, 1990. PCR primer pairs can be derived from a known sequence, for example, by using computer programs intended for that purpose such as the PCR primer analysis tool in Vector NTI version 10 (Invitrogen); PrimerSelect (DNASTAR Inc., Madison, Wis.); and Primer (Version 0.5.COPYRGT., 1991, Whitehead Institute for Biomedical Research, Cambridge, Mass.). Additionally, the sequence can be visually scanned and primers manually identified using guidelines known to one of skill in the art.

### IX. Method of Identifying Dicamba Decarboxylase Variants

[0195] Various methods can be employed to identify further dicamba decarboxylase variants. The polynucleotides are optionally used as substrates for a variety of diversity generating procedures or for rational enzyme design.

[0196] i. Methods of Generating Diversity in Dicamba Decarboxylases

[0197] A variety of diversity generating procedures, e.g., mutation, recombination and recursive recombination reactions can be employed, in addition to their use in standard cloning methods as set forth in, e.g., Ausubel, Berger and Sambrook, i.e., to produce additional dicamba decarboxylase polynucleotides and polypeptides with desired properties. A variety of diversity generating protocols can be used. The procedures can be used separately, and/or in combination to produce one or more variants of a polynucleotide or set of polynucleotides, as well variants of encoded proteins. Individually and collectively, these procedures provide robust, widely applicable ways of generating diversified polynucleotides and sets of polynucleotides (including, e.g., polynucleotide libraries) useful, e.g., for the engineering or rapid evolution of polynucleotides, proteins, pathways, cells and/or organisms with new and/or improved characteristics. The process of altering the sequence can result in, for example, single nucleotide substitutions, multiple nucleotide substitutions, and insertion or deletion of regions of the nucleic acid sequence.

[0198] While distinctions and classifications are made in the course of the ensuing discussion for clarity, it will be appreciated that the techniques are often not mutually exclusive. Indeed, the various methods can be used singly or in combination, in parallel or in series, to access diverse sequence variants.

[0199] The result of any of the diversity generating procedures described herein can be the generation of one or more polynucleotides, which can be selected or screened for polynucleotides that encode proteins with or which confer desirable properties. Following diversification by one or more of the methods herein, or otherwise available to one of skill, any polynucleotides that are produced can be selected for a desired activity or property, e.g. altered K_{M}, use of alternative cofactors, increased k_{cat}, etc. This can include identifying any activity that can be detected, for example, in an automated or automatable format, by any of the assays in the art. For example, modified dicamba decarboxylase polypeptides can be detected by assaying for dicamba decarboxylation activity. Assays to measure such activity are described elsewhere herein. A variety of related (or even unrelated) properties can be evaluated, in serial or in parallel, at the discretion of the practitioner.

[0200] Descriptions of a variety of diversity generating procedures, including family shuffling and methods for generating modified nucleic acid sequences encoding multiple enzymatic domains, are found in the following publications and the references cited therein: Soong N. et al. (2000) Nat Genet 25(4):436-39; Stemmer et al. (1999) Tumor Targeting 4:1-4; Ness et al. (1999) Nature Biotechnology 17:893-896; Chang et al. (1999) Nature Biotechnology 17:793-797; Minshull and Stemmer (1999) Current Opinion in Chemical Biology 3:284-290; Christians et al. (1999) Nature Biotechnology 17:259-264; Crameri et al. (1998) Nature 391:288-291; Crameri et al. (1997) Nature Biotechnology 15:436-438; Zhang et al. (1997) Proc. Natl. Acad. Sci. USA 94:4504-4509; Patten et al. (1997) Current Opinion in Biotechnology 8:724-733; Crameri et al. (1996) Nature Medicine 2:100-103; Crameri et al. (1996) Nature Biotechnology 14:315-319; Gates et al. (1996) Journal of Molecular Biology 255:373-386; Stemmer (1996) “Sexual PCR and Assembly PCR” In: The Encyclopedia of Molecular Biology. VCH Publishers, New York. pp. 447-457; Crameri and Stemmer (1995) BioTechniques 18:194-195; Stemmer et al. (1995) Gene: 164:49-53; Stemmer (1995) Science 270: 1510; Stemmer (1995) Bio/Technology 13:549-553; Stemmer (1994) Nature 370:389-391; and Stemmer (1994) Proc. Natl. Acad. Sci. USA 91:10747-10751. See also WO2008/073877 and US 20070204369, both of which are herein incorporated by reference in their entirety.

[0201] Mutational methods of generating diversity include, for example, site-directed mutagenesis (Ling et al. (1997) Anal Biochem. 254(2): 157-178; Dale et al. (1996) Methods Mol. Biol. 57:369-374; Smith (1985) Ann. Rev. Genet. 19:423-462; Botstein & Shortle (1985) Science 229:1193-1201; Carter (1986) Biochem. J. 237:1-7; and Kunkel (1987) Nucleic Acids & Molecular Biology (Eckstein, F. and Lilley, D. M. J. eds., Springer Verlag, Berlin)); mutagenesis using uracil containing templates (Kunkel (1985) Proc. Natl. Acad. Sci. USA 82:488-492; Kunkel et al. (1987) Methods in Enzymol. 154, 367-382; and Bass et al. (1988) Science 242:240-245); oligonucleotide-directed mutagenesis (Methods in Enzymol. 100: 468-500 (1983); Methods in Enzymol. 154: 329-350 (1987); Zoller & Smith (1982) Nucleic Acids Res. 10:6487-6500; Zoller & Smith (1983) Methods in Enzymol. 100:468-500; and Zoller & Smith (1987) Methods in Enzymol. 154:329-350); phosphorothioate-modified DNA mutagenesis (Taylor et al. (1985) Nucl. Acids Res. 13: 8749-8764; Taylor et al. (1985) Nuc. Acids Res. 13: 8765-8787 (1985); Nakamaye & Eckstein (1986) Nucl. Acids Res. 14: 9679-9698; Sayers et al. (1988) Nucl. Acids Res. 16:791-802; and Sayers et al. (1988) Nucl. Acids Res. 16: 803-814); mutagenesis using gapped duplex DNA (Kramer et al. (1984) Nucl. Acids Res. 12: 9441-9456; Kramer & Fritz (1987) Methods in Enzymol. 154:350-367; Kramer et al. (1988) Nucl. Acids Res. 16: 7207; and Fritz et al. (1988) Nucl. Acids Res. 16: 6987-6999).

[0202] Additional suitable methods include, but are not limited to, point mismatch repair (Kramer et al. (1984) Cell 38:879-887), mutagenesis using repair-deficient host strains (Carter et al. (1985) Nucl. Acids Res. 13: 4431-4443; and Carter (1987) Methods in Enzymol. 154: 382-403), deletion mutagenesis (Eghtedarzadeh & Henikoff (1986) Nucl. Acids Res. 14: 5115), restriction-selection and restriction-purification (Wells et al. (1986) Phil. Trans. R. Soc. Lond. A 317: 415-423), mutagenesis by total gene synthesis (Nambiar et al. (1984) Science 223: 1299-1301; Sakamar and Khorana (1988) Nucl. Acids Res. 14: 6361-6372; Wells et al. (1985) Gene 34:315-323; and Grundström et al. (1985) Nucl. Acids Res. 13: 3305-3316), and double-strand break repair (Mandecki (1986); Arnold (1993) Current Opinion in Biotechnology 4:450-455 and Proc. Natl. Acad. Sci. USA, 83:7177-7181). Additional details on many of the above methods can be found in Methods in Enzymology Volume 154, which also describes useful controls for trouble-shooting problems with various mutagenesis methods.

[0203] Additional details regarding various diversity generating methods can be found in the following U.S. patents, PCT publications, and EPO publications: U.S. Pat. No. 5,605,793, U.S. Pat. No. 5,811,238, U.S. Pat. No. 5,830,721, U.S. Pat. No. 5,834,252, U.S. Pat. No. 5,837,458, WO 95/22625, WO 96/33207, WO 97/20078, WO 97/35966, WO 99/41402, WO 99/41383, WO 99/41369, WO 99/41368, EP 752008, EP 0932670, WO 99/23107, WO 99/21979, WO 98/31837, WO 98/27230, WO 98/13487, WO 00/00632, WO 00/09679, WO 98/42832, WO 99/29902, WO 98/41653, WO 98/41622, WO 98/42727, WO 00/18906, WO 00/04190, WO 00/42561, WO 00/42559, WO 00/42560, WO 01/23401, and, PCT/US01/06775. See, also WO20074303, herein incorporated by reference in their entirety.

[0204] In brief, several different general classes of sequence modification methods, such as mutation, recombination, etc. are applicable to the present invention and set forth, e.g., in the references above. That is, alterations to the component nucleic acid sequences to produced modified gene fusion constructs can be performed by any number of the protocols described, either before cojoining of the sequences, or after the cojoining step. The following exemplify some of the different types of preferred formats for diversity generation in the context of the present invention, including, e.g., certain recombination based diversity generation formats.

[0205] Nucleic acids can be recombined in vitro by any of a variety of techniques discussed in the references above, including e.g., DNAse digestion of nucleic acids to be recombined followed by ligation and/or PCR reassembly of the nucleic acids. For example, sexual PCR mutagenesis can be used in which random (or pseudo random, or even non-random) fragmentation of the DNA molecule is followed by recombination, based on sequence similarity, between DNA molecules with different but related DNA sequences, in vitro, followed by fixation of the crossover by extension in a polymerase chain reaction. This process and many process variants are described in several of the references above, e.g., in Stemmer (1994) Proc. Natl. Acad. Sci. USA 91:10747-10751.

[0206] Similarly, nucleic acids can be recursively recombined in vivo, e.g., by allowing recombination to occur between nucleic acids in cells. Many such in vivo recombination formats are set forth in the references noted above. Such formats optionally provide direct recombination between nucleic acids of interest, or provide recombination between vectors, viruses, plasmids, etc., comprising the nucleic acids of interest, as well as other formats. Details regarding such procedures are found in the references noted above.

[0207] Whole genome recombination methods can also be used in which whole genomes of cells or other organisms are recombined, optionally including spiking of the genomic recombination mixtures with desired library components (e.g., genes corresponding to the pathways of the present invention). These methods have many applications, including those in which the identity of a target gene is not known. Details on such methods are found, e.g., in WO 98/31837 and in PCT/US99/15972. Thus, any of these processes and techniques for recombination, recursive recombination, and whole genome recombination, alone or in combination, can be used to generate the modified nucleic acid sequences and/or modified gene fusion constructs of the present invention.

[0208] Synthetic recombination methods can also be used, in which oligonucleotides corresponding to targets of interest are synthesized and reassembled in PCR or ligation reactions which include oligonucleotides which correspond to more than one parental nucleic acid, thereby generating new recombined nucleic acids. Oligonucleotides can be made by standard nucleotide addition methods, or can be made, e.g., by tri-nucleotide synthetic approaches. Details regarding such approaches are found in the references noted above, including, e.g., WO 00/42561, WO 01/23401, WO 00/42560, and, WO 00/42559.

[0209] In silico methods of recombination can be affected in which genetic algorithms are used in a computer to recombine sequence strings which correspond to homologous (or even non-homologous) nucleic acids. The resulting recombined sequence strings are optionally converted into nucleic acids by synthesis of nucleic acids which correspond to the recombined sequences, e.g., in concert with oligonucleotide synthesis/gene reassembly techniques. This approach can generate random, partially random or designed variants. Many details regarding in silico recombination, including the use of genetic algorithms, genetic operators and the like in computer systems, combined with generation of corresponding nucleic acids (and/or proteins), as well as combinations of designed nucleic acids and/or proteins (e.g., based on cross-over site selection) as well as designed, pseudo-random or random recombination methods are described in WO 00/42560 and WO 00/42559.

[0210] Many methods of accessing natural diversity, e.g., by hybridization of diverse nucleic acids or nucleic acid fragments to single-stranded templates, followed by polymerization and/or ligation to regenerate full-length sequences, optionally followed by degradation of the templates and recovery of the resulting modified nucleic acids can be similarly used. In one method employing a single-stranded template, the fragment population derived from the genomic library(ies) is annealed with partial, or, often approximately full length ssDNA or RNA corresponding to the opposite strand. Assembly of complex chimeric genes from this population is then mediated by nuclease-base removal of non-hybridizing fragment ends, polymerization to fill gaps between such fragments and subsequent single stranded ligation. The parental polynucleotide strand can be removed by digestion (e.g., if RNA or uracil-containing), magnetic separation under denaturing conditions (if labeled in a manner conducive to such separation) and other available separation/purification methods. Alternatively, the parental strand is optionally co-purified with the chimeric strands and removed during subsequent screening and processing steps. Additional details regarding this approach are found, e.g., in PCT/US01/06775.

[0211] In another approach, single-stranded molecules are converted to double-stranded DNA (dsDNA) and the dsDNA molecules are bound to a solid support by ligand-mediated binding. After separation of unbound DNA, the selected DNA molecules are released from the support and introduced into a suitable host cell to generate a library enriched sequences which hybridize to the probe. A library produced in this manner provides a desirable substrate for further diversification using any of the procedures described herein.

[0212] Any of the preceding general recombination formats can be practiced in a reiterative fashion (e.g., one or more cycles of mutation/recombination or other diversity generation methods, optionally followed by one or more selection methods) to generate a more diverse set of recombinant nucleic acids.

[0213] Mutagenesis employing polynucleotide chain termination methods have also been proposed (see e.g., U.S. Pat. No. 5,965,408 and the references above), and can be applied to the present invention. In this approach, double stranded DNAs corresponding to one or more genes sharing regions of sequence similarity are combined and denatured, in the presence or absence of primers specific for the gene. The single stranded polynucleotides are then annealed and incubated in the presence of a polymerase and a chain terminating reagent (e.g., ultraviolet, gamma or X-ray irradiation; ethidium bromide or other intercalators; DNA binding proteins, such as single strand binding proteins, transcription activating factors, or histones; polycyclic aromatic hydrocarbons; trivalent chromium or a trivalent chromium salt; or abbreviated polymerization mediated by rapid thermocycling; and the like), resulting in the production of partial duplex molecules. The partial duplex molecules, e.g., containing partially extended chains, are then denatured and reannealed in subsequent rounds of replication or partial replication resulting in polynucleotides which share varying degrees of sequence similarity and which are diversified with respect to the starting population of DNA molecules. Optionally, the products, or partial pools of the products, can be amplified at one or more stages in the process. Polynucleotides produced by a chain termination method, such as described above, are suitable substrates for any other described recombination format.

[0214] Diversity also can be generated in nucleic acids or populations of nucleic acids using a recombinational procedure termed “incremental truncation for the creation of hybrid enzymes” (“ITCHY”) described in Ostermeier et al. (1999) Nature Biotech 17:1205. This approach can be used to generate an initial a library of variants which can optionally serve as a substrate for one or more in vitro or in vivo recombination methods. See, also, Ostermeier et al. (1999) Proc. Natl. Acad. Sci. USA, 96: 3562-67; Ostermeier et al. (1999), Biological and Medicinal Chemistry 7: 2139-44.

[0215] Mutational methods which result in the alteration of individual nucleotides or groups of contiguous or non-contiguous nucleotides can be favorably employed to introduce nucleotide diversity into the nucleic acid sequences and/or gene fusion constructs of the present invention. Many mutagenesis methods are found in the above-cited references; additional details regarding mutagenesis methods can be found in following, which can also be applied to the present invention.

[0216] For example, error-prone PCR can be used to generate nucleic acid variants. Using this technique, PCR is performed under conditions where the copying fidelity of the DNA polymerase is low, such that a high rate of point mutations is obtained along the entire length of the PCR product. Examples of such techniques are found in the references above and, e.g., in Leung et al. (1989) Technique 1:11-15 and Caldwell et al. (1992) PCR Methods Applic. 2:28-33. Similarly, assembly PCR can be used, in a process which involves the assembly of a PCR product from a mixture of small DNA fragments. A large number of different PCR reactions can occur in parallel in the same reaction mixture, with the products of one reaction priming the products of another reaction.

[0217] Oligonucleotide directed mutagenesis can be used to introduce site-specific mutations in a nucleic acid sequence of interest. Examples of such techniques are found in the references above and, e.g., in Reidhaar-Olson et al. (1988) Science 241:53-57. Similarly, cassette mutagenesis can be used in a process that replaces a small region of a double stranded DNA molecule with a synthetic oligonucleotide cassette that differs from the native sequence. The oligonucleotide can contain, e.g., completely and/or partially randomized native sequence(s).

[0218] Recursive ensemble mutagenesis is a process in which an algorithm for protein mutagenesis is used to produce diverse populations of phenotypically related mutants, members of which differ in amino acid sequence. This method uses a feedback mechanism to monitor successive rounds of combinatorial cassette mutagenesis. Examples of this approach are found in Arkin & Youvan (1992) Proc. Natl. Acad. Sci. USA 89:7811-7815.

[0219] Exponential ensemble mutagenesis can be used for generating combinatorial libraries with a high percentage of unique and functional mutants. Small groups of residues in a sequence of interest are randomized in parallel to identify, at each altered position, amino acids which lead to functional proteins. Examples of such procedures are found in Delegrave & Youvan (1993) Biotechnology Research 11:1548-1552.

[0220] In vivo mutagenesis can be used to generate random mutations in any cloned DNA of interest by propagating the DNA, e.g., in a strain of E. coli that carries mutations in one or more of the DNA repair pathways. These “mutator” strains have a higher random mutation rate than that of a wild-type parent. Propagating the DNA in one of these strains will eventually generate random mutations within the DNA. Such procedures are described in the references noted above.

[0221] Other procedures for introducing diversity into a genome, e.g. a bacterial, fungal, animal or plant genome can be used in conjunction with the above described and/or referenced methods. For example, in addition to the methods above, techniques have been proposed which produce nucleic acid multimers suitable for transformation into a variety of species (see, e.g., U.S. Pat. No. 5,756,316 and the references above). Transformation of a suitable host with such multimers, consisting of genes that are divergent with respect to one another, (e.g., derived from natural diversity or through application of site directed mutagenesis, error prone PCR, passage through mutagenic bacterial strains, and the like), provides a source of nucleic acid diversity for DNA diversification, e.g., by an in vivo recombination process as indicated above.

[0222] Alternatively, a multiplicity of monomeric polynucleotides sharing regions of partial sequence similarity can be transformed into a host species and recombined in vivo by the host cell. Subsequent rounds of cell division can be used to generate libraries, members of which, include a single, homogenous population, or pool of monomeric polynucleotides. Alternatively, the monomeric nucleic acid can be recovered by standard techniques, e.g., PCR and/or cloning, and recombined in any of the recombination formats, including recursive recombination formats, described above.

[0223] Methods for generating multispecies expression libraries have been described (in addition to the reference noted above, see, e.g., U.S. Pat. No. 5,783,431 and U.S. Pat. No. 5,824,485) and their use to identify protein activities of interest has been proposed (In addition to the references noted above, see, U.S. Pat. No. 5,958,672. Multispecies expression libraries include, in general, libraries comprising cDNA or genomic sequences from a plurality of species or strains, operably linked to appropriate regulatory sequences, in an expression cassette. The cDNA and/or genomic sequences are optionally randomly ligated to further enhance diversity. The vector can be a shuttle vector suitable for transformation and expression in more than one species of host organism, e.g., bacterial species, eukaryotic cells. In some cases, the library is biased by preselecting sequences which encode a protein of interest, or which hybridize to a nucleic acid of interest. Any such libraries can be provided as substrates for any of the methods herein described.

[0224] The above described procedures have been largely directed to increasing nucleic acid and/or encoded protein diversity. However, in many cases, not all of the diversity is useful, e.g., functional, and contributes merely to increasing the background of variants that must be screened or selected to identify the few favorable variants. In some applications, it is desirable to preselect or prescreen libraries (e.g., an amplified library, a genomic library, a cDNA library, a normalized library, etc.) or other substrate nucleic acids prior to diversification, e.g., by recombination-based mutagenesis procedures, or to otherwise bias the substrates towards nucleic acids that encode functional products. For example, in the case of antibody engineering, it is possible to bias the diversity generating process toward antibodies with functional antigen binding sites by taking advantage of in vivo recombination events prior to manipulation by any of the described methods. For example, recombined CDRs derived from B cell cDNA libraries can be amplified and assembled into framework regions (e.g., Jirholt et al. (1998) Gene 215: 471) prior to diversifying according to any of the methods described herein.

[0225] Libraries can be biased towards nucleic acids which encode proteins with desirable enzyme activities. For example, after identifying a variant from a library which exhibits a specified activity, the variant can be mutagenized using any known method for introducing DNA alterations. A library comprising the mutagenized homologues is then screened for a desired activity, which can be the same as or different from the initially specified activity. An example of such a procedure is proposed in U.S. Pat. No. 5,939,250. Desired activities can be identified by any method known in the art. For example, WO 99/10539 proposes that gene libraries can be screened by combining extracts from the gene library with components obtained from metabolically rich cells and identifying combinations which exhibit the desired activity. It has also been proposed (e.g., WO 98/58085) that clones with desired activities can be identified by inserting bioactive substrates into samples of the library, and detecting bioactive fluorescence corresponding to the product of a desired activity using a fluorescent analyzer, e.g., a flow cytometry device, a CCD, a fluorometer, or a spectrophotometer.

[0226] Libraries can also be biased towards nucleic acids which have specified characteristics, e.g., hybridization to a selected nucleic acid probe. For example, application WO 99/10539 proposes that polynucleotides encoding a desired activity (e.g., an enzymatic activity, for example: a lipase, an esterase, a protease, a glycosidase, a glycosyl transferase, a phosphatase, a kinase, an oxygenase, a peroxidase, a hydrolase, a hydratase, a nitrilase, a transaminase, an amidase or an acylase) can be identified from among genomic DNA sequences in the following manner. Single stranded DNA molecules from a population of genomic DNA are hybridized to a ligand-conjugated probe. The genomic DNA can be derived from either a cultivated or uncultivated microorganism, or from an environmental sample. Alternatively, the genomic DNA can be derived from a multicellular organism, or a tissue derived there from. Second strand synthesis can be conducted directly from the hybridization probe used in the capture, with or without prior release from the capture medium or by a wide variety of other strategies known in the art. Alternatively, the isolated single-stranded genomic DNA population can be fragmented without further cloning and used directly in, e.g., a recombination-based approach, that employs a single-stranded template, as described above.

[0227] “Non-Stochastic” methods of generating nucleic acids and polypeptides are found in WO 00/46344. These methods, including proposed non-stochastic polynucleotide reassembly and site-saturation mutagenesis methods be applied to the present invention as well. Random or semi-random mutagenesis using doped or degenerate oligonucleotides is also described in, e.g., Arkin and Youvan (1992) Biotechnology 10:297-300; Reidhaar-Olson et al. (1991) Methods Enzymol. 208:564-86; Lim and Sauer (1991) J. Mol. Biol. 219:359-76; Breyer and Sauer (1989) J. Biol. Chem. 264:13355-60); and U.S. Pat. Nos. 5,830,650 and 5,798,208, and EP Patent 0527809 B1.

[0228] It will readily be appreciated that any of the above described techniques suitable for enriching a library prior to diversification can also be used to screen the products, or libraries of products, produced by the diversity generating methods. Any of the above described methods can be practiced recursively or in combination to alter nucleic acids, e.g., dicamba decarboxylase encoding polynucleotides.

[0229] The above references provide many mutational formats, including recombination, recursive recombination, recursive mutation and combinations or recombination with other forms of mutagenesis, as well as many modifications of these formats. Regardless of the diversity generation format that is used, the nucleic acids of the present invention can be recombined (with each other, or with related (or even unrelated) sequences) to produce a diverse set of recombinant nucleic acids for use in the gene fusion constructs and modified gene fusion constructs of the present invention, including, e.g., sets of homologous nucleic acids, as well as corresponding polypeptides.

[0230] Many of the above-described methodologies for generating modified polynucleotides generate a large number of diverse variants of a parental sequence or sequences. In some embodiments, the modification technique (e.g., some form of shuffling) is used to generate a library of variants that is then screened for a modified polynucleotide or pool of modified polynucleotides encoding some desired functional attribute, e.g., maintained or improved dicamba decarboxylase activity.

[0231] One example of selection for a desired enzymatic activity entails growing host cells under conditions that inhibit the growth and/or survival of cells that do not sufficiently express an enzymatic activity of interest, e.g. the dicamba decarboxylase activity. Using such a selection process can eliminate from consideration all modified polynucleotides except those encoding a desired enzymatic activity. For example, in some embodiments of the invention host cells are maintained under conditions that inhibit cell growth or survival in the presence of sufficient levels of dicamba. Under these conditions, only a host cell harboring a dicamba decarboxylase enzymatic activity or activities that is able to decarboxylase the dicamba will survive and grow. Some embodiments of the invention employ multiples rounds of screening at increasing concentrations of dicamba.

[0232] For convenience and high throughput it will often be desirable to screen/select for desired modified nucleic acids in a microorganism, e.g., a bacteria such as E. coli. On the other hand, screening in plant cells or plants can in some cases be preferable where the ultimate aim is to generate a modified nucleic acid for expression in a plant system.

[0233] In some preferred embodiments of the invention throughput is increased by screening pools of host cells expressing different modified nucleic acids, either alone or as part of a gene fusion construct. Any pools showing significant activity can be deconvoluted to identify single variants expressing the desirable activity.

[0234] In high throughput assays, it is possible to screen up to several thousand different variants in a single day. For example, each well of a microtiter plate can be used to run a separate assay, or, if concentration or incubation time effects are to be observed, every 5-10 wells can test a single variant.

[0235] In addition to fluidic approaches, it is possible, as mentioned above, simply to grow cells on media plates that select for the desired enzymatic or metabolic function. This approach offers a simple and high-throughput screening method.

[0236] A number of well known robotic systems have also been developed for solution phase chemistries useful in assay systems. These systems include automated workstations like the automated synthesis apparatus developed by Takeda Chemical Industries, LTD. (Osaka, Japan) and many robotic systems utilizing robotic arms (Zymate II, Zymark Corporation, Hopkinton, Mass.; Orca, Hewlett-Packard, Palo Alto, CA) which mimic the manual synthetic operations performed by a scientist. Any of the above devices are suitable for application to the present invention. The nature and implementation of modifications to these devices (if any) so that they can operate as discussed herein with reference to the integrated system will be apparent to persons skilled in the relevant art.

[0237] High throughput screening systems are commercially available (see, e.g., Zymark Corp., Hopkinton, Mass.; Air Technical Industries, Mentor, Ohio; Beckman Instruments, Inc. Fullerton, Calif.; Precision Systems, Inc., Natick, Mass., etc.). These systems typically automate entire procedures including all sample and reagent pipetting, liquid dispensing, timed incubations, and final readings of the microplate in detector(s) appropriate for the assay. These configurable systems provide high throughput and rapid start up as well as a high degree of flexibility and customization.

[0238] The manufacturers of such systems provide detailed protocols for the various high throughput devices. Thus, for example, Zymark Corp. provides technical bulletins describing screening systems for detecting the modulation of gene transcription, ligand binding, and the like. Microfluidic approaches to reagent manipulation have also been developed, e.g., by Caliper Technologies (Mountain View, Calif.).

### X. Sequence Comparisons

[0239] The following terms are used to describe the sequence relationships between two or more polynucleotides or polypeptides: (a) “reference sequence”, (b) “comparison window”, (c) “sequence identity”, and, (d) “percent sequence identity.”

[0240] (a) As used herein, “reference sequence” is a defined sequence used as a basis for sequence comparison. A reference sequence may be a subset or the entirety of a specified sequence; for example, as a segment of a full-length cDNA or gene sequence, or the complete cDNA or gene sequence or protein sequence.

[0241] (b) As used herein, “comparison window” makes reference to a contiguous and specified segment of a polypeptide sequence, wherein the polypeptide sequence in the comparison window may comprise additions or deletions (i.e., gaps) compared to the reference sequence (which does not comprise additions or deletions) for optimal alignment of the two polypeptides. Generally, the comparison window is at least 5, 10, 15, or 20 contiguous amino acid in length, or it can be 30, 40, 50, 100, or longer. Those of skill in the art understand that to avoid a high similarity to a reference sequence due to inclusion of gaps in the polypeptide sequence a gap penalty is typically introduced and is subtracted from the number of matches.

[0242] Methods of alignment of sequences for comparison are well known in the art. Thus, the determination of percent sequence identity between any two sequences can be accomplished using a mathematical algorithm. Non-limiting examples of such mathematical algorithms are the algorithm of Myers and Miller (1988) CABIOS 4:11-17; the local alignment algorithm of Smith et al. (1981) Adv. Appl. Math. 2:482; the global alignment algorithm of Needleman and Wunsch (1970) J Mol. Biol. 48:443-453; the search-for-local alignment method of Pearson and Lipman (1988) Proc. Natl. Acad. Sci. 85:2444-2448; the algorithm of Karlin and Altschul (1990) Proc. Natl. Acad. Sci. USA 872264, modified as in Karlin and Altschul (1993) Proc. Natl. Acad. Sci. USA 90:5873-5877.

[0243] Computer implementations of these mathematical algorithms can be utilized for comparison of sequences to determine sequence identity. Such implementations include, but are not limited to: CLUSTAL in the PC/Gene program (available from Intelligenetics, Mountain View, Calif.); the ALIGN program (Version 2.0) and GAP, BESTFIT, BLAST, FASTA, and TFASTA in the GCG Wisconsin Genetics Software Package, Version 10 (available from Accelrys Inc., 9685 Scranton Road, San Diego, Calif., USA). Alignments using these programs can be performed using the default parameters. The CLUSTAL program is well described by Higgins et al. (1988) Gene 73:237-244 (1988); Higgins et al. (1989) CABIOS 5:151-153; Corpet et al. (1988) Nucleic Acids Res. 16:10881-90; Huang et al. (1992) CABIOS 8:155-65; and Pearson et al. (1994) Meth. Mol. Biol. 24:307-331. The ALIGN program is based on the algorithm of Myers and Miller (1988) supra. A PAM120 weight residue table, a gap length penalty of 12, and a gap penalty of 4 can be used with the ALIGN program when comparing amino acid sequences. The BLAST programs of Altschul et al (1990) J. Mol. Biol. 215:403 are based on the algorithm of Karlin and Altschul (1990) supra. BLAST nucleotide searches can be performed with the BLASTN program, score=100, wordlength=12, to obtain nucleotide sequences homologous to a nucleotide sequence encoding a protein of the invention. BLAST protein searches can be performed with the BLASTX program, score=50, wordlength=3, to obtain amino acid sequences homologous to a protein or polypeptide of the invention. BLASTP protein searches can be performed using default parameters. See, blast.ncbi.nlm.nih.gov/Blast.cgi.

[0244] To obtain gapped alignments for comparison purposes, Gapped BLAST (in BLAST 2.0) can be utilized as described in Altschul et al. (1997) Nucleic Acids Res. 25:3389. Alternatively, PSI-BLAST (in BLAST 2.0) can be used to perform an iterated search that detects distant relationships between molecules. See Altschul et al. (1997) supra. When utilizing BLAST, Gapped BLAST, or PSI-BLAST, the default parameters of the respective programs (e.g., BLASTN for nucleotide sequences, BLASTP for proteins) can be used. See www.ncbi.nlm.nih.gov. Alignment may also be performed manually by inspection.

[0245] In one embodiment, sequence identity/similarity values provided herein refer to the value obtained using GAP Version 10 using the following parameters: % identity and % similarity for an amino acid sequence using GAP Weight of 8 and Length Weight of 2, and the BLOSUM62 scoring matrix; or any equivalent program thereof. By “equivalent program” is intended any sequence comparison program that, for any two sequences in question, generates an alignment having identical nucleotide or amino acid residue matches and an identical percent sequence identity when compared to the corresponding alignment generated by GAP Version 10.

[0246] GAP uses the algorithm of Needleman and Wunsch (1970) J. Mol. Biol. 48:443-453, to find the alignment of two complete sequences that maximizes the number of matches and minimizes the number of gaps. GAP considers all possible alignments and gap positions and creates the alignment with the largest number of matched bases and the fewest gaps. It allows for the provision of a gap creation penalty and a gap extension penalty in units of matched bases. GAP must make a profit of gap creation penalty number of matches for each gap it inserts. If a gap extension penalty greater than zero is chosen, GAP must, in addition, make a profit for each gap inserted of the length of the gap times the gap extension penalty. Default gap creation penalty values and gap extension penalty values in Version 10 of the GCG Wisconsin Genetics Software Package for protein sequences are 8 and 2, respectively. For nucleotide sequences the default gap creation penalty is 50 while the default gap extension penalty is 3. The gap creation and gap extension penalties can be expressed as an integer selected from the group of integers consisting of from 0 to 200. Thus, for example, the gap creation and gap extension penalties can be 0, 1, 2, 3, 4, 5, 6, 7, 8, 9, 10, 15, 20, 25, 30, 35, 40, 45, 50, 55, 60, 65 or greater.

[0247] GAP presents one member of the family of best alignments. There may be many members of this family, but no other member has a better quality. GAP displays four figures of merit for alignments: Quality, Ratio, Identity, and Similarity. The Quality is the metric maximized in order to align the sequences. Ratio is the quality divided by the number of bases in the shorter segment. Percent Identity is the percent of the symbols that actually match. Percent Similarity is the percent of the symbols that are similar. Symbols that are across from gaps are ignored. A similarity is scored when the scoring matrix value for a pair of symbols is greater than or equal to 0.50, the similarity threshold. The scoring matrix used in Version 10 of the GCG Wisconsin Genetics Software Package is BLOSUM62 (see Henikoff and Henikoff (1989) Proc. Natl. Acad. Sci. USA 89:10915).

[0248] (c) As used herein, “sequence identity” or “identity” in the context of two polynucleotides or polypeptide sequences makes reference to the residues in the two sequences that are the same when aligned for maximum correspondence over a specified comparison window. When percentage of sequence identity is used in reference to proteins it is recognized that residue positions which are not identical often differ by conservative amino acid substitutions, where amino acid residues are substituted for other amino acid residues with similar chemical properties (e.g., charge or hydrophobicity). When sequences differ in conservative substitutions, the percent sequence identity may be adjusted upwards to correct for the conservative nature of the substitution. Sequences that differ by such conservative substitutions are said to have “sequence similarity” or “similarity”. Means for making this adjustment are well known to those of skill in the art. Typically this involves scoring a conservative substitution as a partial rather than a full mismatch, thereby increasing the percent sequence identity. Thus, for example, where an identical amino acid is given a score of 1 and a non-conservative substitution is given a score of zero, a conservative substitution is given a score between zero and 1. The scoring of conservative substitutions is calculated, e.g., as implemented in the program PC/GENE (Intelligenetics, Mountain View, Calif.).

[0249] (d) As used herein, “percent sequence identity” means the value determined by comparing two optimally aligned sequences over a comparison window, wherein the portion of the polynucleotide sequence in the comparison window may comprise additions or deletions (i.e., gaps) as compared to the reference sequence (which does not comprise additions or deletions) for optimal alignment of the two sequences. The percentage is calculated by determining the number of positions at which the identical nucleic acid base or amino acid residue occurs in both sequences to yield the number of matched positions, dividing the number of matched positions by the total number of positions in the window of comparison, and multiplying the result by 100 to yield the percent sequence identity.

[0250] (e) Two sequences are “optimally aligned” when they are aligned for similarity scoring using a defined amino acid substitution matrix (e.g., BLOSUM62), gap existence penalty and gap extension penalty so as to arrive at the highest score possible for that pair of sequences. Amino acids substitution matrices and their use in quantifying the similarity between two sequences are well-known in the art and described, e.g., in Dayhoff et al. (1978) “A model of evolutionary change in proteins.” In “Atlas of Protein Sequence and Structure,” Vol. 5, Suppl. 3 (ed. M. O. Dayhoff), pp. 345-352. Natl. Biomed. Res. Found, Washington, D.C. and Henikoff et al. (1992) Proc. Natl. Acad. Sci. USA 89:10915-10919. The BLOSUM62 matrix (FIG. 10) is often used as a default scoring substitution matrix in sequence alignment protocols such as Gapped BLAST 2.0. The gap existence penalty is imposed for the introduction of a single amino acid gap in one of the aligned sequences, and the gap extension penalty is imposed for each additional empty amino acid position inserted into an already opened gap. The gap existence penalty is imposed for the introduction of a single amino acid gap in one of the aligned sequences, and the gap extension penalty is imposed for each additional empty amino acid position inserted into an already opened gap. The alignment is defined by the amino acids positions of each sequence at which the alignment begins and ends, and optionally by the insertion of a gap or multiple gaps in one or both sequences, so as to arrive at the highest possible score. While optimal alignment and scoring can be accomplished manually, the process is facilitated by the use of a computer-implemented alignment algorithm, e.g., gapped BLAST 2.0, described in Altschul et al, (1997) Nucleic Acids Res. 25:3389-3402, and made available to the public at the National Center for Biotechnology Information Website (http://www.ncbi.nlm.nih.gov). Optimal alignments, including multiple alignments, can be prepared using, e.g., PSI-BLAST, available through http://www.ncbi.nlm.nih.gov and described by Altschul et al, (1997) Nucleic Acids Res. 25:3389-3402.

[0251] As used herein, similarity score and bit score is determined employing the BLAST alignment used the BLOSUM62 substitution matrix, a gap existence penalty of 11, and a gap extension penalty of 1. For the same pair of sequences, if there is a numerical difference between the scores obtained when using one or the other sequence as query sequences, a greater value of similarity score is selected.

[0252] Non-limiting embodiments include:

[0253] 1. A plant cell having stably incorporated into its genome a heterologous polynucleotide encoding a polypeptide having dicamba decarboxylase activity.

[0254] 2. The plant cell of embodiment 1, wherein said polypeptide having dicamba decarboxylase activity comprises an active site having a catalytic residue geometry as set forth in Table 3 or having a substantially similar catalytic residue geometry.

[0255] 3. The plant cell of embodiment 2, wherein said polypeptide having dicamba decarboxylase activity further comprises:

[0256] (a) an amino acid sequence having a similarity score of at least 548 for any one of SEQ ID NO: 51, 89, 79, 81, 95, or 100, wherein said similarity score is generated using the BLAST alignment program, with the BLOSUM62 substitution matrix, a gap existence penalty of 11, and a gap extension penalty of 1;

[0257] (b) an amino acid sequence having at least 60%, 70%, 75%, 80% 90%, 95% or 100% sequence identity to any one of SEQ ID NOS: 1, 2, 4, 5, 16, 19, 21, 22, 26, 28, 30, 21, 32, 33, 34, 35, 36, 41, 43, 44, 46, 47, 48, 49, 50, 51, 52, 53, 54, 55, 56, 57, 58, 79, 81, 87, 88, 89, 91, 108, 109, 111, 112, 113, 114, 115, 116, 117, 118, 119, 120, 121, 122, 123, 124, 125, 126, 127, 128, or 129;

[0258] (c) an amino acid sequence having at least 60% sequence identity to SEQ ID NO: 1, 2, 4, 5, 16, 19, 21, 22, 26, 28, 30, 21, 32, 33, 34, 35, 36, 41, 43, 44, 46, 47, 48, 49, 50, 51, 52, 53, 54, 55, 56, 57, 58, 79, 81, 87, 88, 89, 91, 108, 109, 111, 112, 113, 114, 115, 116, 117, 118, 119, 120, 121, 122, 123, 124, 125, 126, 127, 128, or 129, wherein
[0259] (i) the amino acid residue in the encoded polypeptide that corresponds to amino acid position 27 of SEQ ID NO: 109 comprises alanine, serine, or threonine;
[0260] (ii) the amino acid residue in the encoded polypeptide that corresponds to amino acid position 38 of SEQ ID NO: 109 comprises isoleucine;
[0261] (iii) the amino acid residue in the encoded polypeptide that corresponds to amino acid position 42 of SEQ ID NO: 109 comprises alanine, methionine, or serine;
[0262] (iv) the amino acid residue in the encoded polypeptide that corresponds to amino acid position 52 of SEQ ID NO: 109 comprises glutamic acid;
[0263] (v) the amino acid residue in the encoded polypeptide that corresponds to amino acid position 61 of SEQ ID NO: 109 comprises alanine or serine;
[0264] (vi) the amino acid residue in the encoded polypeptide that corresponds to amino acid position 64 of SEQ ID NO: 109 comprises glycine, or serine;
[0265] (vii) the amino acid residue in the encoded polypeptide that corresponds to amino acid position 127 of SEQ ID NO: 109 comprises methionine;
[0266] (iix) the amino acid residue in the encoded polypeptide that corresponds to amino acid position 238 of SEQ ID NO: 109 comprises glycine;
[0267] (ix) the amino acid residue in the encoded polypeptide that corresponds to amino acid position 240 of SEQ ID NO: 109 comprises alanine, aspartic acid, or glutamic acid;
[0268] (x) the amino acid residue in the encoded polypeptide that corresponds to amino acid position 298 of SEQ ID NO: 109 comprises alanine or threonine,
[0269] (xi) the amino acid residue in the encoded polypeptide that corresponds to amino acid position 299 of SEQ ID NO: 109 comprises alanine;
[0270] (xii) the amino acid residue in the encoded polypeptide that corresponds to amino acid position 303 of SEQ ID NO: 109 comprises cysteine, glutamic acid, or serine;
[0271] (xiii) the amino acid residue in the encoded polypeptide that corresponds to amino acid position 327 of SEQ ID NO: 109 comprises leucine, glutamine, or valine; or,
[0272] (ixv) the amino acid residue in the encoded polypeptide that corresponds to amino acid position 328 of SEQ ID NO: 109 comprises aspartic acid, arginine, or serine;
[0273] (xv) the amino acid residue in the encoded protein that corresponds to the amino acid position of SEQ ID NO: 109 as set forth in Table 7 and corresponds to the specific amino acid substitution also set forth in Table 7 or any combination of residues denoted in Table 7.

[0274] 4. The plant cell of embodiment 1, wherein said polypeptide comprises:
[0275] (a) an amino acid sequence having a similarity score of at least 548 for any one of SEQ ID NO: 51, 89, 79, 81, 95, or 100, wherein said similarity score is generated using the BLAST alignment program, with the BLOSUM62 substitution matrix, a gap existence penalty of 11, and a gap extension penalty of 1;
[0276] (b) an amino acid sequence having at least 85%, 90%, 95% or 100% sequence identity to any one of SEQ ID NOS: 1, 2, 4, 5, 16, 19, 21, 22, 26, 28, 30, 21, 32, 33, 34, 35, 36, 41, 43, 44, 46, 47, 48, 49, 50, 51, 52, 53, 54, 55, 56, 57, 58, 79, 81, 87, 88, 89, 91, 108, 109, 111, 112, 113, 114, 115, 116, 117, 118, 119, 120, 121, 122, 123, 124, 125, 126, 127, 128, or 129; or,
[0277] (c) an amino acid sequence having at least 60% sequence identity to SEQ ID NO: 1, 2, 4, 5, 16, 19, 21, 22, 26, 28, 30, 21, 32, 33, 34, 35, 36, 41, 43, 44, 46, 47, 48, 49, 50, 51, 52, 53, 54, 55, 56, 57, 58, 79, 81, 87, 88, 89, 91, 108, 109, 111, 112, 113, 114, 115, 116, 117, 118, 119, 120, 121, 122, 123, 124, 125, 126, 127, 128, or 129, and wherein
   [0278] (i) the amino acid residue in the encoded polypeptide that corresponds to amino acid position 27 of SEQ ID NO: 109 comprises alanine, serine, or threonine;
   [0279] (ii) the amino acid residue in the encoded polypeptide that corresponds to amino acid position 38 of SEQ ID NO: 109 comprises isoleucine;
   [0280] (iii) the amino acid residue in the encoded polypeptide that corresponds to amino acid position 42 of SEQ ID NO: 109 comprises alanine, methionine, or serine;
   [0281] (iv) the amino acid residue in the encoded polypeptide that corresponds to amino acid position 52 of SEQ ID NO: 109 comprises glutamic acid;
   [0282] (v) the amino acid residue in the encoded polypeptide that corresponds to amino acid position 61 of SEQ ID NO: 109 comprises alanine or serine;
   [0283] (vi) the amino acid residue in the encoded polypeptide that corresponds to amino acid position 64 of SEQ ID NO: 109 comprises glycine, or serine;
   [0284] (vii) the amino acid residue in the encoded polypeptide that corresponds to amino acid position 127 of SEQ ID NO: 109 comprises methionine;
   [0285] (iix) the amino acid residue in the encoded polypeptide that corresponds to amino acid position 238 of SEQ ID NO: 109 comprises glycine;
   [0286] (ix) the amino acid residue in the encoded polypeptide that corresponds to amino acid position 240 of SEQ ID NO: 109 comprises alanine, aspartic acid, or glutamic acid;
   [0287] (x) the amino acid residue in the encoded polypeptide that corresponds to amino acid position 298 of SEQ ID NO: 109 comprises alanine or threonine,
   [0288] (xi) the amino acid residue in the encoded polypeptide that corresponds to amino acid position 299 of SEQ ID NO: 109 comprises alanine;
   [0289] (xii) the amino acid residue in the encoded polypeptide that corresponds to amino acid position 303 of SEQ ID NO: 109 comprises cysteine, glutamic acid, or serine;
   [0290] (xiii) the amino acid residue in the encoded polypeptide that corresponds to amino acid position 327 of SEQ ID NO: 109 comprises leucine, glutamine, or valine;
   [0291] (ixv) the amino acid residue in the encoded polypeptide that corresponds to amino acid position 328 of SEQ ID NO: 109 comprises aspartic acid, arginine, or serine; and/or,
   [0292] (xv) the amino acid residue in the encoded protein that corresponds to the amino acid position of SEQ ID NO: 109 as set forth in Table 7 and corresponds to the specific amino acid substitution also set forth in Table 7 or any combination of residues denoted in Table 7.

[0293] 5. The plant cell of any one of embodiments 1-4, wherein said polypeptide having dicamba decarboxylase activity has a k_{cat}/Kₘ of at least 0.0001 mM⁻¹ min⁻¹ for dicamba.

[0294] 6. The plant cell of any one of embodiments 1-5, wherein the plant cell exhibits enhanced resistance to dicamba as compared to a wild type plant cell of the same species, strain or cultivar.

[0295] 7. The plant cell of any one of embodiments 1-6, wherein said plant cell is from a monocot.

[0296] 8. The plant cell of embodiment 7, wherein said monocot is maize, wheat, rice, barley, sugarcane, sorghum, or rye.

[0297] 9. The plant cell of any one of embodiments 1-6, wherein said plant cell is from a dicot.

[0298] 10. The plant cell of embodiment 9, wherein the dicot is soybean, Brassica, sunflower, cotton, or alfalfa.

[0299] 11. A plant comprising a plant cell of any one of embodiments 1-10.

[0300] 12. The plant of embodiment 11, wherein the plant exhibits tolerance to dicamba applied at a level effective to inhibit the growth of the same plant lacking the polypeptide having dicamba decarboxylase activity, without significant yield reduction due to herbicide application.

[0301] 13. A plant explant comprising a plant cell of any one of embodiments 1-10.

[0302] 14. The plant, the explant, or the plant cell of any one of embodiments 1-13, wherein the plant, the explant or the plant cell further comprises at least one polypeptide imparting tolerance to an additional herbicide.

[0303] 15. The plant, the explant, or the plant cell of embodiment 14, wherein said at least one polypeptide imparting tolerance to an additional herbicide comprises:
[0304] (a) a sulfonylurea-tolerant acetolactate synthase;
[0305] (b) an imidazolinone-tolerant acetolactate synthase;
[0306] (c) a glyphosate-tolerant 5-enolpyruvylshikimate-3-phosphate synthase;
[0307] (d) a glyphosate-tolerant glyphosate oxido-reductase;
[0308] (e) a glyphosate-N-acetyltransferase;
[0309] (f) a phosphinothricin acetyl transferase;
[0310] (g) a protoporphyrinogen oxidase or a protoporphorinogen detoxification enzyme;
[0311] (h) an auxin enzyme or auxin tolerance protein;
[0312] (i) a P450 polypeptide;
[0313] (j) an acetyl coenzyme A carboxylase (ACCase);
[0314] (k) a high resistance allele of acetolactate synthase (HRA);
[0315] (l) a hydroxyphenylpyruvate dioxygenase (HPPD) or an HPPD detoxification enzyme; and/or,
[0316] (j) a dicamba monooxygenase.

[0317] 16. The plant, the explant, or the plant cell of embodiment 14, wherein said at least one polypeptide imparting tolerance to an additional herbicide confers tolerance to 2,4 D or comprise an aryloxyalkanoate di-oxygenase.

[0318] 17. The plant, the explant, or the plant cell of any one of embodiments 1-16, wherein the plant, the explant or the plant cell further comprises at least one additional polypeptide imparting tolerance to dicamba.

[0319] 18. A transgenic seed produced by the plant of any one of embodiments 12 or 14-17.

[0320] 19. A method of producing a plant cell having a heterologous polynucleotide encoding a polypeptide having dicamba decarboxylase activity comprising transforming said plant cell with a heterologous polynucleotide encoding a polypeptide having dicamba decarboxylase activity.

[0321] 20. The method of embodiment 19, wherein said polypeptide having dicamba decarboxylase activity comprises an active site having a catalytic residue geometry as set forth in Table 3 or having a substantially similar catalytic residue geometry.

[0322] 21. The method of embodiment 20, wherein said polypeptide having dicamba decarboxylase activity comprises

[0323] (a) an amino acid sequence having a similarity score of at least 548 for any one of SEQ ID NO: 51, 89, 79, 81, 95, or 100, wherein said similarity score is generated using the BLAST alignment program, with the BLOSUM62 substitution matrix, a gap existence penalty of 11, and a gap extension penalty of 1;

[0324] (b) an amino acid sequence having at least 60%, 70%, 75%, 80% 90%, 95% or 100% sequence identity to any one of SEQ ID NOS: 1, 2, 4, 5, 16, 19, 21, 22, 26, 28, 30, 21, 32, 33, 34, 35, 36, 41, 43, 44, 46, 47, 48, 49, 50, 51, 52, 53, 54, 55, 56, 57, 58, 79, 81, 87, 88, 89, 91, 108, 109, 111, 112, 113, 114, 115, 116, 117, 118, 119, 120, 121, 122, 123, 124, 125, 126, 127, 128, or 129; or,

[0325] (c) an amino acid sequence having at least 60% sequence identity to SEQ ID NO: 1, 2, 4, 5, 16, 19, 21, 22, 26, 28, 30, 21, 32, 33, 34, 35, 36, 41, 43, 44, 46, 47, 48, 49, 50, 51, 52, 53, 54, 55, 56, 57, 58, 79, 81, 87, 88, 89, 91, 108, 109, 111, 112, 113, 114, 115, 116, 117, 118, 119, 120, 121, 122, 123, 124, 125, 126, 127, 128, or 129 and wherein
[0326] (i) the amino acid residue in the encoded polypeptide that corresponds to amino acid position 27 of SEQ ID NO: 109 comprises alanine, serine, or threonine;
[0327] (ii) the amino acid residue in the encoded polypeptide that corresponds to amino acid position 38 of SEQ ID NO: 109 comprises isoleucine;
[0328] (iii) the amino acid residue in the encoded polypeptide that corresponds to amino acid position 42 of SEQ ID NO: 109 comprises alanine, methionine, or serine;
[0329] (iv) the amino acid residue in the encoded polypeptide that corresponds to amino acid position 52 of SEQ ID NO: 109 comprises glutamic acid;
[0330] (v) the amino acid residue in the encoded polypeptide that corresponds to amino acid position 61 of SEQ ID NO: 109 comprises alanine or serine;
[0331] (vi) the amino acid residue in the encoded polypeptide that corresponds to amino acid position 64 of SEQ ID NO: 109 comprises glycine, or serine;
[0332] (vii) the amino acid residue in the encoded polypeptide that corresponds to amino acid position 127 of SEQ ID NO: 109 comprises methionine;
[0333] (iix) the amino acid residue in the encoded polypeptide that corresponds to amino acid position 238 of SEQ ID NO: 109 comprises glycine;
[0334] (ix) the amino acid residue in the encoded polypeptide that corresponds to amino acid position 240 of SEQ ID NO: 109 comprises alanine, aspartic acid, or glutamic acid;
[0335] (x) the amino acid residue in the encoded polypeptide that corresponds to amino acid position 298 of SEQ ID NO: 109 comprises alanine or threonine,
[0336] (xi) the amino acid residue in the encoded polypeptide that corresponds to amino acid position 299 of SEQ ID NO: 109 comprises alanine;
[0337] (xii) the amino acid residue in the encoded polypeptide that corresponds to amino acid position 303 of SEQ ID NO: 109 comprises cysteine, glutamic acid, or serine;
[0338] (xiii) the amino acid residue in the encoded polypeptide that corresponds to amino acid position 327 of SEQ ID NO: 109 comprises leucine, glutamine, or valine;
[0339] (ixv) the amino acid residue in the encoded polypeptide that corresponds to amino acid position 328 of SEQ ID NO: 109 comprises aspartic acid, arginine, or serine; and/or
[0340] (xv) the amino acid residue in the encoded protein that corresponds to the amino acid position of SEQ ID NO: 109 as set forth in Table 7 and corresponds to the specific amino acid substitution also set forth in Table 7 or any combination of residues denoted in Table 7.

[0341] 22. The method of embodiment 19, wherein said polypeptide having dicamba decarboxylase activity comprises:
[0342] (a) an amino acid sequence having a similarity score of at least 548 for any one of SEQ ID NO: 51, 89, 79, 81, 95, or 100, wherein said similarity score is generated using the BLAST alignment program, with the BLOSUM62 substitution matrix, a gap existence penalty of 11, and a gap extension penalty of 1;
[0343] (b) an amino acid sequence having at least 85%, 90%, 95% or 100% sequence identity to any one of SEQ ID NOS: 1, 2, 4, 5, 16, 19, 21, 22, 26, 28, 30, 21, 32, 33, 34, 35, 36, 41, 43, 44, 46, 47, 48, 49, 50, 51, 52, 53, 54, 55, 56, 57, 58, 79, 81, 87, 88, 89, 91, 108, 109, 111, 112, 113, 114, 115, 116, 117, 118, 119, 120, 121, 122, 123, 124, 125, 126, 127, 128, or 129,
[0344] (c) an amino acid sequence having at least 60% sequence identity to SEQ ID NO: 1, 2, 4, 5, 16, 19, 21, 22, 26, 28, 30, 21, 32, 33, 34, 35, 36, 41, 43, 44, 46, 47, 48, 49, 50, 51, 52, 53, 54, 55, 56, 57, 58, 79, 81, 87, 88, 89, 91, 108, 109, 111, 112, 113, 114, 115, 116, 117, 118, 119, 120, 121, 122, 123, 124, 125, 126, 127, 128, or 129 and wherein
   [0345] (i) the amino acid residue in the encoded polypeptide that corresponds to amino acid position 27 of SEQ ID NO: 109 comprises alanine, serine, or threonine;
   [0346] (ii) the amino acid residue in the encoded polypeptide that corresponds to amino acid position 38 of SEQ ID NO: 109 comprises isoleucine;
   [0347] (iii) the amino acid residue in the encoded polypeptide that corresponds to amino acid position 42 of SEQ ID NO: 109 comprises alanine, methionine, or serine;
   [0348] (iv) the amino acid residue in the encoded polypeptide that corresponds to amino acid position 52 of SEQ ID NO: 109 comprises glutamic acid;
   [0349] (v) the amino acid residue in the encoded polypeptide that corresponds to amino acid position 61 of SEQ ID NO: 109 comprises alanine or serine;
   [0350] (vi) the amino acid residue in the encoded polypeptide that corresponds to amino acid position 64 of SEQ ID NO: 109 comprises glycine, or serine;
   [0351] (vii) the amino acid residue in the encoded polypeptide that corresponds to amino acid position 127 of SEQ ID NO: 109 comprises methionine;
   [0352] (iix) the amino acid residue in the encoded polypeptide that corresponds to amino acid position 238 of SEQ ID NO: 109 comprises glycine;
   [0353] (ix) the amino acid residue in the encoded polypeptide that corresponds to amino acid position 240 of SEQ ID NO: 109 comprises alanine, aspartic acid, or glutamic acid;
   [0354] (x) the amino acid residue in the encoded polypeptide that corresponds to amino acid position 298 of SEQ ID NO: 109 comprises alanine or threonine,
   [0355] (xi) the amino acid residue in the encoded polypeptide that corresponds to amino acid position 299 of SEQ ID NO: 109 comprises alanine;
   [0356] (xii) the amino acid residue in the encoded polypeptide that corresponds to amino acid position 303 of SEQ ID NO: 109 comprises cysteine, glutamic acid, or serine;
   [0357] (xiii) the amino acid residue in the encoded polypeptide that corresponds to amino acid position 327 of SEQ ID NO: 109 comprises leucine, glutamine, or valine;
   [0358] (ixv) the amino acid residue in the encoded polypeptide that corresponds to amino acid position 328 of SEQ ID NO: 109 comprises aspartic acid, arginine, or serine; and/or
   [0359] (xv) the amino acid residue in the encoded protein that corresponds to the amino acid position of SEQ ID NO: 109 as set forth in Table 7 and corresponds to the specific amino acid substitution also set forth in Table 7 or any combination of residues denoted in Table 7.

[0360] 23. The method of any one of embodiments 19-22, wherein said polypeptide having dicamba decarboxylase activity has a k_{cat}/Kₘ of at least 0.001 mM⁻¹ min⁻¹ for dicamba.

[0361] 24. The method of embodiments 19-23, further comprising selecting a plant cell which is resistant to dicamba by growing the transgenic plant or plant cell in the presence of a concentration of dicamba under conditions where the dicamba decarboxylase is expressed at an effective level, whereby the transgenic plant or plant cell grows at a rate that is discernibly greater than the plant or plant cell would grow if it did not contain the nucleic acid construct.

[0362] 25. The method of embodiment 19-24, wherein said method further comprises regenerating a transgenic plant from said plant cell.

[0363] 26. A method to decarboxylate dicamba, a derivative of dicamba or a metabolite of dicamba comprising applying to a plant, an explant, a plant cell or a seed as set forth in any one of embodiments 1-19 dicamba or an active derivative thereof, and wherein expression of the dicamba decarboxylase decarboxylates the dicamba, the active derivative thereof or the dicamba metabolite.

[0364] 27. The method of embodiment 26, wherein expression of the dicamba decarboxylase reduces the herbicidal activity of said dicamba, said dicamba derivative or said dicamba metabolite.

[0365] 28. A method for controlling weeds in a field containing a crop comprising:
[0366] (a) applying to an area of cultivation, a crop or a weed in an area of cultivation a sufficient amount of dicamba or an active derivative thereof to control weeds without significantly affecting the crop; and,
[0367] (b) planting the field with the transgenic seeds of embodiment 18 or the plant of any one of embodiments 12 or 14-17.

[0368] 29. The method of embodiment 26, 27 or 28, wherein said dicamba is applied to the area of cultivation or to said plant.

[0369] 30. The method of embodiment 28, wherein step (a) occurs before or simultaneously with or after step (b).

[0370] 31. The method of embodiment 28, 29 or 30, further comprising applying to the crop and weeds in the field a sufficient amount of at least one additional herbicide comprising glyphosate, bialaphos, phosphinothricin, sulfosate, glufosinate, an HPPD inhibitor, an ALS inhibitor, a second auxin analog, or a protox inhibitor.

[0371] 32. A method for detecting a dicamba decarboxylase polypeptide comprising analyzing plant tissues using an immunoassay comprising an antibody or antibodies that specifically recognizes a polypeptide having dicamba decarboxylase activity, wherein said antibody or antibodies are raised to a polypeptide or a fragment of a polypeptide having dicamba decarboxylase activity.

[0372] 33. A method for detecting the presence of a polynucleotide encoding a polypeptide having dicamba decarboxylase activity comprising assaying plant tissue using PCR amplification and detecting said polynucleotide encoding a polypeptide having dicamba decarboxylase activity.

[0373] 34. The method of embodiment 32 or 33, wherein said polypeptide having dicamba decarboxylase activity comprises an active site having a catalytic residue geometry as set forth in Table 3 or having a substantially similar catalytic residue geometry.

[0374] 35. The method of embodiment 34, wherein said polypeptide having dicamba decarboxylase activity comprises:

[0375] (a) an amino acid sequence having a similarity score of at least 548 for any one of SEQ ID NO: 51, 89, 79, 81, 95, or 100, wherein said similarity score is generated using the BLAST alignment program, with the BLOSUM62 substitution matrix, a gap existence penalty of 11, and a gap extension penalty of 1;

[0376] (b) an amino acid sequence having at least 60%, 70%, 75%, 80% 90%, 95% or 100% sequence identity to any one of SEQ ID NOS: 1, 2, 4, 5, 16, 19, 21, 22, 26, 28, 30, 21, 32, 33, 34, 35, 36, 41, 43, 44, 46, 47, 48, 49, 50, 51, 52, 53, 54, 55, 56, 57, 58, 79, 81, 87, 88, 89, 91, 108, 109, 111, 112, 113, 114, 115, 116, 117, 118, 119, 120, 121, 122, 123, 124, 125, 126, 127, 128, or 129; or

[0377] (c) an amino acid sequence having at least 60% sequence identity to SEQ ID NO: 1, 2, 4, 5, 16, 19, 21, 22, 26, 28, 30, 21, 32, 33, 34, 35, 36, 41, 43, 44, 46, 47, 48, 49, 50, 51, 52, 53, 54, 55, 56, 57, 58, 79, 81, 87, 88, 89, 91, 108, 109, 111, 112, 113, 114, 115, 116, 117, 118, 119, 120, 121, 122, 123, 124, 125, 126, 127, 128, or 129 and wherein
[0378] (i) the amino acid residue in the encoded polypeptide that corresponds to amino acid position 27 of SEQ ID NO: 109 comprises alanine, serine, or threonine;
[0379] (ii) the amino acid residue in the encoded polypeptide that corresponds to amino acid position 38 of SEQ ID NO: 109 comprises isoleucine;
[0380] (iii) the amino acid residue in the encoded polypeptide that corresponds to amino acid position 42 of SEQ ID NO: 109 comprises alanine, methionine, or serine;
[0381] (iv) the amino acid residue in the encoded polypeptide that corresponds to amino acid position 52 of SEQ ID NO: 109 comprises glutamic acid;
[0382] (v) the amino acid residue in the encoded polypeptide that corresponds to amino acid position 61 of SEQ ID NO: 109 comprises alanine or senile;
[0383] (vi) the amino acid residue in the encoded polypeptide that corresponds to amino acid position 64 of SEQ ID NO: 109 comprises glycine, or serine;
[0384] (vii) the amino acid residue in the encoded polypeptide that corresponds to amino acid position 127 of SEQ ID NO: 109 comprises methionine;
[0385] (iix) the amino acid residue in the encoded polypeptide that corresponds to amino acid position 238 of SEQ ID NO: 109 comprises glycine;
[0386] (ix) the amino acid residue in the encoded polypeptide that corresponds to amino acid position 240 of SEQ ID NO: 109 comprises alanine, aspartic acid, or glutamic acid;
[0387] (x) the amino acid residue in the encoded polypeptide that corresponds to amino acid position 298 of SEQ ID NO: 109 comprises alanine or threonine,
[0388] (xi) the amino acid residue in the encoded polypeptide that corresponds to amino acid position 299 of SEQ ID NO: 109 comprises alanine;
[0389] (xii) the amino acid residue in the encoded polypeptide that corresponds to amino acid position 303 of SEQ ID NO: 109 comprises cysteine, glutamic acid, or serine;
[0390] (xiii) the amino acid residue in the encoded polypeptide that corresponds to amino acid position 327 of SEQ ID NO: 109 comprises leucine, glutamine, or valine;
[0391] (ixv) the amino acid residue in the encoded polypeptide that corresponds to amino acid position 328 of SEQ ID NO: 109 comprises aspartic acid, arginine, or serine; and/or,
[0392] (xv) the amino acid residue in the encoded protein that corresponds to the amino acid position of SEQ ID NO: 109 as set forth in Table 7 and corresponds to the specific amino acid substitution also set forth in Table 7 or any combination of residues denoted in Table 7.

[0393] 36. The method of embodiment 32 or 33, wherein said polypeptide having dicamba decarboxylase activity comprises:
[0394] (a) an amino acid sequence having a similarity score of at least 548 for any one of SEQ ID NO: 51, 89, 79, 81, 95, or 100, wherein said similarity score is generated using the BLAST alignment program, with the BLOSUM62 substitution matrix, a gap existence penalty of 11, and a gap extension penalty of 1;
[0395] (b) an amino acid sequence having at least 85%, 90%, 95% or 100% sequence identity to any one of SEQ ID NOS: 1, 2, 4, 5, 16, 19, 21, 22, 26, 28, 30, 21, 32, 33, 34, 35, 36, 41, 43, 44, 46, 47, 48, 49, 50, 51, 52, 53, 54, 55, 56, 57, 58, 79, 81, 87, 88, 89, 91, 108, 109, 111, 112, 113, 114, 115, 116, 117, 118, 119, 120, 121, 122, 123, 124, 125, 126, 127, 128, or 129; or,
[0396] (c) an amino acid sequence having at least 60% sequence identity to SEQ ID NO: 1, 2, 4, 5, 16, 19, 21, 22, 26, 28, 30, 21, 32, 33, 34, 35, 36, 41, 43, 44, 46, 47, 48, 49, 50, 51, 52, 53, 54, 55, 56, 57, 58, 79, 81, 87, 88, 89, 91, 108, 109, 111, 112, 113, 114, 115, 116, 117, 118, 119, 120, 121, 122, 123, 124, 125, 126, 127, 128, or 129, wherein
   [0397] (i) the amino acid residue in the encoded polypeptide that corresponds to amino acid position 27 of SEQ ID NO: 109 comprises alanine, serine, or threonine;
   [0398] (ii) the amino acid residue in the encoded polypeptide that corresponds to amino acid position 38 of SEQ ID NO: 109 comprises isoleucine;
   [0399] (iii) the amino acid residue in the encoded polypeptide that corresponds to amino acid position 42 of SEQ ID NO: 109 comprises alanine, methionine, or serine;
   [0400] (iv) the amino acid residue in the encoded polypeptide that corresponds to amino acid position 52 of SEQ ID NO: 109 comprises glutamic acid;
   [0401] (v) the amino acid residue in the encoded polypeptide that corresponds to amino acid position 61 of SEQ ID NO: 109 comprises alanine or serine;
   [0402] (vi) the amino acid residue in the encoded polypeptide that corresponds to amino acid position 64 of SEQ ID NO: 109 comprises glycine, or serine;
   [0403] (vii) the amino acid residue in the encoded polypeptide that corresponds to amino acid position 127 of SEQ ID NO: 109 comprises methionine;
   [0404] (iix) the amino acid residue in the encoded polypeptide that corresponds to amino acid position 238 of SEQ ID NO: 109 comprises glycine;
   [0405] (ix) the amino acid residue in the encoded polypeptide that corresponds to amino acid position 240 of SEQ ID NO: 109 comprises alanine, aspartic acid, or glutamic acid;
   [0406] (x) the amino acid residue in the encoded polypeptide that corresponds to amino acid position 298 of SEQ ID NO: 109 comprises alanine or threonine,
   [0407] (xi) the amino acid residue in the encoded polypeptide that corresponds to amino acid position 299 of SEQ ID NO: 109 comprises alanine;
   [0408] (xii) the amino acid residue in the encoded polypeptide that corresponds to amino acid position 303 of SEQ ID NO: 109 comprises cysteine, glutamic acid, or serine;
   [0409] (xiii) the amino acid residue in the encoded polypeptide that corresponds to amino acid position 327 of SEQ ID NO: 109 comprises leucine, glutamine, or valine;
   [0410] (ixv) the amino acid residue in the encoded polypeptide that corresponds to amino acid position 328 of SEQ ID NO: 109 comprises aspartic acid, arginine, or serine; and/or,
   [0411] (xv) the amino acid residue in the encoded protein that corresponds to the amino acid position of SEQ ID NO: 109 as set forth in Table 7 and corresponds to the specific amino acid substitution also set forth in Table 7 or any combination of residues denoted in Table 7.

[0412] 37. The method of embodiment 36, wherein said polypeptide having dicamba decarboxylase activity comprises an active site having a catalytic residue geometry as set forth in Table 3 or having a substantially similar catalytic residue geometry.

[0413] 38. The method of embodiment 37, wherein said polypeptide having dicamba decarboxylase activity comprises:

[0414] (a) an amino acid sequence having a similarity score of at least 548 for any one of SEQ ID NO: 51, 89, 79, 81, 95, or 100, wherein said similarity score is generated using the BLAST alignment program, with the BLOSUM62 substitution matrix, a gap existence penalty of 11, and a gap extension penalty of 1; or,

[0415] (b) an amino acid sequence having at least 60%, 70%, 75%, 80% 90%, 95% or 100% sequence identity to any one of SEQ ID NOS: 1, 2, 4, 5, 16, 19, 21, 22, 26, 28, 30, 21, 32, 33, 34, 35, 36, 41, 43, 44, 46, 47, 48, 49, 50, 51, 52, 53, 54, 55, 56, 57, 58, 79, 81, 87, 88, 89, 91, 108, 109, 111, 112, 113, 114, 115, 116, 117, 118, 119, 120, 121, 122, 123, 124, 125, 126, 127, 128, or 129; or,

[0416] (c) an amino acid sequence having at least 60% sequence identity to SEQ ID NO: 1, 2, 4, 5, 16, 19, 21, 22, 26, 28, 30, 21, 32, 33, 34, 35, 36, 41, 43, 44, 46, 47, 48, 49, 50, 51, 52, 53, 54, 55, 56, 57, 58, 79, 81, 87, 88, 89, 91, 108, 109, 111, 112, 113, 114, 115, 116, 117, 118, 119, 120, 121, 122, 123, 124, 125, 126, 127, 128, or 129, wherein
[0417] (i) the amino acid residue in the encoded polypeptide that corresponds to amino acid position 27 of SEQ ID NO: 109 comprises alanine, serine, or threonine;
[0418] (ii) the amino acid residue in the encoded polypeptide that corresponds to amino acid position 38 of SEQ ID NO: 109 comprises isoleucine;
[0419] (iii) the amino acid residue in the encoded polypeptide that corresponds to amino acid position 42 of SEQ ID NO: 109 comprises alanine, methionine, or serine;
[0420] (iv) the amino acid residue in the encoded polypeptide that corresponds to amino acid position 52 of SEQ ID NO: 109 comprises glutamic acid;
[0421] (v) the amino acid residue in the encoded polypeptide that corresponds to amino acid position 61 of SEQ ID NO: 109 comprises alanine or serine;
[0422] (vi) the amino acid residue in the encoded polypeptide that corresponds to amino acid position 64 of SEQ ID NO: 109 comprises glycine, or serine;
[0423] (vii) the amino acid residue in the encoded polypeptide that corresponds to amino acid position 127 of SEQ ID NO: 109 comprises methionine;
[0424] (iix) the amino acid residue in the encoded polypeptide that corresponds to amino acid position 238 of SEQ ID NO: 109 comprises glycine;
[0425] (ix) the amino acid residue in the encoded polypeptide that corresponds to amino acid position 240 of SEQ ID NO: 109 comprises alanine, aspartic acid, or glutamic acid;
[0426] (x) the amino acid residue in the encoded polypeptide that corresponds to amino acid position 298 of SEQ ID NO: 109 comprises alanine or threonine,
[0427] (xi) the amino acid residue in the encoded polypeptide that corresponds to amino acid position 299 of SEQ ID NO: 109 comprises alanine;
[0428] (xii) the amino acid residue in the encoded polypeptide that corresponds to amino acid position 303 of SEQ ID NO: 109 comprises cysteine, glutamic acid, or serine;
[0429] (xiii) the amino acid residue in the encoded polypeptide that corresponds to amino acid position 327 of SEQ ID NO: 109 comprises leucine, glutamine, or valine;
[0430] (ixv) the amino acid residue in the encoded polypeptide that corresponds to amino acid position 328 of SEQ ID NO: 109 comprises aspartic acid, arginine, or serine; and/or,
[0431] (xv) the amino acid residue in the encoded protein that corresponds to the amino acid position of SEQ ID NO: 109 as set forth in Table 7 and corresponds to the specific amino acid substitution also set forth in Table 7 or any combination of residues denoted in Table 7.

[0432] Additional non-limiting embodiments include:

[0433] 1. An isolated or recombinant polypeptide having dicamba decarboxylase activity comprising:

[0434] (a) a polypeptide having a catalytic residue geometry as set forth in Table 3 or having a substantially similar catalytic residue geometry and further comprising an amino acid sequence having a similarity score of at least 548 for any one of SEQ ID NO: 51, 89, 79, 81, 95, or 100, wherein said similarity score is generated using the BLAST alignment program, with the BLOSUM62 substitution matrix, a gap existence penalty of 11, and a gap extension penalty of 1;

[0435] (b) a polypeptide having a catalytic residue geometry as set forth in Table 3 or having a substantially similar catalytic residue geometry and further comprising an amino acid sequence having at least 60%, 70%, 75%, 80% 90%, 95% or 100% sequence identity to any one of SEQ ID NOS: 1, 2, 4, 5, 16, 19, 21, 22, 26, 28, 30, 21, 32, 33, 34, 35, 36, 41, 43, 44, 46, 47, 48, 49, 50, 51, 52, 53, 54, 55, 56, 57, 58, 79, 81, 87, 88, 89, 91, 108, 109, 111, 112, 113, 114, 115, 116, 117, 118, 119, 120, 121, 122, 123, 124, 125, 126, 127, 128, or 129; or,

[0436] (c) a polypeptide having a catalytic residue geometry as set forth in Table 3 or having a substantially similar catalytic residue geometry and further comprising an amino acid sequence having at least 60% 70%, 75%, 80% 90%, or 95% sequence identity to SEQ ID NO: 1, 2, 4, 5, 16, 19, 21, 22, 26, 28, 30, 21, 32, 33, 34, 35, 36, 41, 43, 44, 46, 47, 48, 49, 50, 51, 52, 53, 54, 55, 56, 57, 58, 79, 81, 87, 88, 89, 91, 108, 109, 111, 112, 113, 114, 115, 116, 117, 118, 119, 120, 121, 122, 123, 124, 125, 126, 127, 128, or 129, wherein
[0437] (i) the amino acid residue in the encoded polypeptide that corresponds to amino acid position 27 of SEQ ID NO: 109 comprises alanine, serine, or threonine;
[0438] (ii) the amino acid residue in the encoded polypeptide that corresponds to amino acid position 38 of SEQ ID NO: 109 comprises isoleucine;
[0439] (iii) the amino acid residue in the encoded polypeptide that corresponds to amino acid position 42 of SEQ ID NO: 109 comprises alanine, methionine, or serine;
[0440] (iv) the amino acid residue in the encoded polypeptide that corresponds to amino acid position 52 of SEQ ID NO: 109 comprises glutamic acid;
[0441] (v) the amino acid residue in the encoded polypeptide that corresponds to amino acid position 61 of SEQ ID NO: 109 comprises alanine or serine;
[0442] (vi) the amino acid residue in the encoded polypeptide that corresponds to amino acid position 64 of SEQ ID NO: 109 comprises glycine, or serine;
[0443] (vii) the amino acid residue in the encoded polypeptide that corresponds to amino acid position 127 of SEQ ID NO: 109 comprises methionine;
[0444] (iix) the amino acid residue in the encoded polypeptide that corresponds to amino acid position 238 of SEQ ID NO: 109 comprises glycine;
[0445] (ix) the amino acid residue in the encoded polypeptide that corresponds to amino acid position 240 of SEQ ID NO: 109 comprises alanine, aspartic acid, or glutamic acid;
[0446] (x) the amino acid residue in the encoded polypeptide that corresponds to amino acid position 298 of SEQ ID NO: 109 comprises alanine or threonine,
[0447] (xi) the amino acid residue in the encoded polypeptide that corresponds to amino acid position 299 of SEQ ID NO: 109 comprises alanine;
[0448] (xii) the amino acid residue in the encoded polypeptide that corresponds to amino acid position 303 of SEQ ID NO: 109 comprises cysteine, glutamic acid, or serine;
[0449] (xiii) the amino acid residue in the encoded polypeptide that corresponds to amino acid position 327 of SEQ ID NO: 109 comprises leucine, glutamine, or valine;
[0450] (ixv) the amino acid residue in the encoded polypeptide that corresponds to amino acid position 328 of SEQ ID NO: 109 comprises aspartic acid, arginine, or serine; and/or,
[0451] (xv) the amino acid residue in the encoded protein that corresponds to the amino acid position of SEQ ID NO: 109 as set forth in Table 7 and corresponds to the specific amino acid substitution also set forth in Table 7 or any combination of residues denoted in Table 7.

[0452] 2. The isolated polypeptide of embodiment 1, wherein said polypeptide having dicamba decarboxylase activity has a k_{cat}/Kₘ of at least 0.0001 mM⁻¹ min⁻¹ for dicamba.

[0453] 3. An isolated or recombinant polynucleotide comprising a nucleotide sequence encoding a polypeptide as set forth in embodiment 1 or 2.

[0454] 4. A nucleic acid construct comprising the isolated or recombinant polynucleotide of embodiment 3.

[0455] 5. The nucleic acid construct of embodiment 4, further comprising a promoter operably linked to said polynucleotide.

[0456] 6. A cell comprising at least one polynucleotide of embodiment 3 or the nucleic acid construct of any one of embodiments 4-5, wherein said polynucleotide is heterologous to the cell.

[0457] 7. The cell of embodiment 6, wherein said cell comprises a microbial cell.

[0458] 8. A method of producing a host cell having a heterologous polynucleotide encoding a polypeptide having dicamba decarboxylase activity comprising transforming a host cell with a heterologous polynucleotide as set forth in embodiment 3 or a heterologous nucleic acid construct as set forth in embodiments 4 or 5.

[0459] 9. The method of embodiment 8, wherein said cell comprises a microbial cell.

[0460] 10. A method to decarboxylate dicamba, a dicamba derivative or a dicamba metabolite comprising contacting said dicamba, dicamba derivative or dicamba metabolite with a composition comprising an effective amount of the polypeptide of any one of embodiments 1 or 2 or an effective amount of the host cell of embodiment 6 or 7, wherein said effective amount is sufficient to decarboxylate said dicamba, said dicamba derivative or said dicamba metabolite.

[0461] 11. The method of embodiment 10, wherein said composition is contacted with dicamba.

[0462] 12. A method for detecting a polypeptide comprising using an immunoassay comprising an antibody or antibodies that specifically recognizes a polypeptide having dicamba decarboxylase activity, wherein said antibody or antibodies are raised to a polypeptide having dicamba decarboxylase activity or a fragment of said polypeptide and said polypeptide having dicamba decarboxylase activity comprises a polypeptide of embodiment 1.

[0463] 13. A method for detecting the presence of a polynucleotide encoding a polypeptide having dicamba decarboxylase activity comprising using PCR amplification and detecting said polynucleotide encoding a polypeptide of embodiment 1.

### EXPERIMENTAL

### Example 1

### Methods for Measuring Dicamba Decarboxylase Activities

[0464] Decarboxylation refers to the removal of the COOH (carboxyl group), releasing carbon dioxide (CO₂), and its replacement with a proton. Thus, the first method of choice to measure dicamba decarboxylase activity is to measure CO₂ generated from enzyme reactions. Two methods of measuring CO₂ product were adapted from the literature. The first is a direct measurement of ¹⁴CO₂ formed from [¹⁴C]-carboxyl-labeled dicamba through CO₂ capture. Methods describing such measurement can be found in the literature (Oldham, 1992, in Enzyme Assays: A Practical Approach (Elsenthal, R., and Danson, M. J., Eds.), pp. 93-122, IRL Press, New York). The assay procedure called ¹⁴C assay was adapted and modified from Zhang et al. (Analytical Biochemistry 271, 137-142, 1999). Briefly, [¹⁴C]-carboxyl-labeled dicamba (custom synthesized from PerkinElmer) is used as the substrate and the product, ¹⁴CO₂, is trapped at the top of the microtiter plate by a filter paper impregnated with calcium hydroxide (Ca(OH)₂), a CO₂-absorbing agent. A typical reaction is composed of 2 mM [¹⁴C]-carboxyl-labeled dicamba, 100 mM phosphate buffer (pH 7.0), 50 mM KCl, 100 uM ZnCl₂, and appropriate amount of purified protein. Buffer components and purified protein are premixed and dispensed into wells in a 96-well or 384-well raised-rim, V-bottomed polypropylene microtiter plate. The radioactive substrate is then added to initiate the reaction. The assay plate is promptly covered by a filter paper pre-soaked in 20 mM Ca(OH)₂ solution. A sheet of adhesive tape (Qiagen catalog #1018104), slightly larger than the filter paper, is placed on top to seal the filter paper onto the plate. With a plate sealer, the filter paper is pressed against the reaction plate to prevent the escape of CO₂. One piece of acrylic spacer and one piece of rubber sheet are added sequentially on top of the plate to complete the reaction assembly, which is then clamped using a book press. When the reaction is completed, the pressure from the book press is released and plate removed. The reaction assembly is dissembled and filter paper cut and removed with a standard razor blade. The CO₂-capturing filter paper is then wrapped with Saran Wrap plastic membrane and exposed to a phosphoimage cassette overnight. The phosphoimage cassette is scanned using a Typhoon Trio+Variable Mode Imager (GE Healthcare—Life Sciences). Image analysis is performed with Image Quant TL image analysis software (GE Healthcare—Life Sciences).

[0465] The second method measuring CO₂ product is an indirect measurement using a coupled enzyme assay. When CO₂ is produced in the reaction buffer, it exits in chemical equilibrium producing carbonic acid which in turn rapidly dissociates to form hydrogen ions and bicarbonate by simple proton dissociation/association. Using Infinity™ Carbon Dioxide Liquid Stable Reagent 2×125 mL (Thermo Scientific catalog number TR28321), the amount of CO₂ product is monitored spectrophotometrically at 375 nm by coupling the production of bicarbonate to oxidation of NADH through phosphoenolpyruvate carboxylase (PEPC) and malate dehydrogenase (MDH) provided in the reagent kit. PEPC utilizes CO₂-generated bicarbonate in the sample to produce oxaloacetate and phosphate. MDH then catalyses the reduction of oxaloacetate to malate and the oxidation of NADH to NAD⁺. The resulting decrease in absorbance can be measured at 375 nm and is proportional to the amount of bicarbonate produced from CO₂ present in the sample. Prior to the assay, the pH of the reagent is adjusted to 7.0 using 1N HCL. 260 uL reagent (pH7.0) is added into a Greiner Bio-One flat bottom 96-well plate well containing 30 uL 10× concentrated dicamba stock solution for a final concentration of 0.5 mM to 20 mM. Then 10 uL (1-10 ug) enzyme is added to the mixture and mixed immediately for spectrum monitoring. The reaction plate is measured using a SpectraMax Plus 384 device (Molecular Devices) for changes in absorbance at 375 nm every 10 s for 30 minutes at room temperature. Measured absorbance is then converted to velocity by least squares fitting of each curve using the accompanying program SOFTmax PRO 5.4 with manual assessment/confirmation of the linear range. The velocity of a no-enzyme control is subtracted. An extinction coefficient of 6.22 mM⁻¹ cm⁻¹ for NADH is used to convert velocity values from milli-absorbance units/min to micromolar/min. Kinetic parameters are estimated by fitting initial velocity values to the Michaelis-Menten equation. The overall catalytic efficiency of an enzyme is expressed as k_{cat}/K_{M}.

[0466] Alternatively, dicamba decarboxylase activity can be monitored by measuring decarboxylation products other than CO₂ using product detection methods. The decarboxylation product of dicamba, 2,5-dichloro anisole or 2,5-DCA (FIG. 1C), is a volatile compound with a flash point of 21° C. To capture this volatile compound for detection, 140 ul of toluene solution is added on top of 1 ml reaction mixture to form a trapping layer in a 1.5 ml eppendorf tube. The reaction mixture contains 2 mM dicamba, 100 mM potassium phosphate (pH7.0), 50 mM KCl, 100 uM ZnCl₂, and appropriate amount of purified 100 ug protein. The reaction is kept still at room temperature overnight before being vortex mixed and centrifuged at 14,000 rpm for 15 minutes. The top toluene phase is carefully removed using a micropipette and transferred into a 12×32 mm polypropylene vial (Vial 11 mm) from MicroLiter Analytical Supplies, Inc. (catalog number 11-5300-100). The vial is sealed with Crimp seal (11 mm with FEP/Nat Rubber) from MicroLiter Analytical Supplies, Inc. (catalog number 11-0020A) using a E-Z Crimper™ 11 mm from Wheaton Inc. lul of the toluene mixture is taken from the sealed vials and injected in splitless mode into a GC/MS system for sample analysis (Agilent GC/MS system with a 6890A GC, a 5973N MSD and a CTC CombiPAL auto-sampler or with a 7890A GC, a 5975C MSD and an Agilent GC Sampler 80 auto-sampler). The GC parameters are: Agilent DB-5MS column (30 m length, 0.25 mm diameter, 0.25 um film) or equivalent; The GC inlet temperature, 250° C.; Carry gas, helium in constant flow mode (1.2 mL/min); The GC oven temperature program, initial temperature at 70° C. for 1 min, ramping to 200° C. at 15° C./min, and then ramping to 250° C. at 30° C./min. MS data acquisition is done in SIM (selected ion monitoring) mode, monitoring the positive ion at M/Z 176 for the molecular ion of 2,4-DCA. The solvent delay for MS acquisition is set at 4 min. Another method for detection of 2,5-DCA is a head-space GC/MS method. Briefly, reaction mixtures in 500 ul reaction volume are prepared in 1.5 ml 12×32 mm glass vials (Microliter Analytical Supplies, Cat#11-1200) for head space analysis. Glass vials are sealed with magnetic cap from MicroLiter Analytical Supplies, Inc. (catalog number 11-0030AT) using a E-Z Crimper™ 11 mm from Wheaton Industries Inc. The reaction is carried out at room temperature for various amount of time and stopped by heating at 95° C. for 5 min. The reaction vial is transferred to a agitator for incubation at 80° C. for 5 min at 500 rpm. With a syringe preheated at 80° C., 1000 uL of head space is injected with sample fill speed at 100 uL/sec. GC/MS parameters for headspace analysis are the same as for liquid sample analysis.

[0467] The decarboxylated and chloro hydrolyzed product, 4-chloro-3-methoxy phenol (FIG. 1D), is measured using a LC-MS/MS analytical procedure. Briefly, reaction mixtures containing various amounts of dicamba, 100 mM potassium phosphate (pH7.0), 50 mM KCl, 100 uM ZnCl₂, and appropriate amount of protein in 100 ul reaction volume were incubated at 30° C. for various times. 10 ul is removed from the reaction mixture and mixed with 90 ul pre-chilled methanol followed by centrifugation at 14,000 rpm for 15 min at 4° C. 10 ul of the supernatant is then transferred into 170 ul ddH2O to achieve 5% methanol solution for injection. 50 ul of the prepared sample is injected into a 4000 Q Trap LC-MS/MS system for sample analysis. LC-MS/MS parameters are: Mobile Phase A, 2 mM ammonium acetate in water; Mobile Phase B, 2 mM ammonium acetate in methanol; Column, Aquasil, 100×2.1 mm, 3 μm, C18 column; Flow Rate, 0.6 ml/min. The MS/MS fragment 157/142 which is common to 4-chloro-3-methoxy phenol, 2-chloro-5-methoxy phenol, and 3-chloro-5-methoxy phenol is monitored at a retention time of 2.88 min.

[0468] The decarboxylated and demethylated product of dicamba, 2,5-dichloro phenol or 2,5-DCP (FIG. 1E) is measured using a GC/MS analytical procedure with either liquid injection after liquid/liquid extraction using toluene as the extraction solvent or gas injection using head space method. The head space sample analysis is carried out on an Agilent GC/MS system with a 6890A GC, a 5973N MSD and a CTC CombiPAL auto-sampler or with a 7890A GC, a 5975C MSD and an Agilent GC Sampler 80 auto-sampler with Phenomenex ZB-MultiResidue-1 column (30 m length, 0.25 mm diameter, 0.25 um film) or equivalent. GC/MS parameters are: GC inlet temperature, 200° C.; Carry gas, helium in constant flow mode (1.2 mL/min); Oven temperature program, 70° C. for 1 min and then ramp to 275° C. at 40° C./min. Protein reactions are carried out in a 1.5 ml 12×32 mm glass vials for head space analysis as described previously. The reaction vial is transferred to a agitator for incubation at 90° C. for 4 min at 500 rpm. With a syringe preheated at 110° C., 1000 uL of head space is injected with sample fill speed at 100 uL/sec. A 2-mm diameter liner is used in sample inlet. The MS data acquisition is done in SIM (selected ion monitoring) mode. The positive ion at M/Z 162 for the molecular ion of 2,-5-DCP is monitored at retention time of 4.06 min. Solvent delay for MS acquisition is set at 3 min. GC/MS parameters for liquid sample analysis are the same as those for head space analysis, except that the volume of liquid injection is 1 uL.

[0469] Kinetic determination for dicamba decarboxylases can be achieved by measuring 2,5-DCP using the above GC/MS method. Briefly, a series of dicamba substrate ranging from 0 to 20 mM is used in 7.5 ml decarboxylation reaction mixture described previously. At time 0, 1.5 mL is removed and added to 150 uL 1N HCL. To the remaining 6 mL reaction, a suitable amount of protein is added to start the reaction. At different time points, 1.5 mL reaction is removed and added to 150 uL 1N HCL to stop the reaction. In total, 5 time point samples including time 0 are taken. To neutralize the pH back to 7.0, 150 ul 1N NaOH is added and mixed for 5 minutes. 0.5 mL each sample is transferred to a 1.5 ml 12×32 mm glass vials, sealed, and analyzed as described previously. A series of 2,5-DCP samples is included as standards to determine the molar amount of 2,5-DCP product in the reaction samples. Velocity is calculated by dividing product produced by the time the reaction proceeded. Kinetic parameters are estimated by fitting initial velocity values to the Michaelis-Menten equation.

### Example 2

### Phytotoxicity Evaluation of Decarboxylation Products of Dicamba

[0470] To evaluate whether dicamba decarboxylated product 2,5-DCA is herbicidal to plants, the compound was purchased from Acros Organics (USA, catalog number 264180250) and tested during soybean germination.

[0471] 2,5-DCA was dissolved in ddH₂O to obtain a 10 mM stock solution, and filter sterilized. Soybean seeds of a Pioneer elite germplasm were sterilized with chlorine gas as following: a) two layers of seeds were placed in a 100×25 mm plastic Petri dish; b) in an exhaust fume hood, seeds were placed into a glass desiccator with a 250 mL beaker containing 100 mL bleach (5% NaOCl) and 3.5 mL 12N HCl was slowly added to the beaker; c) the lid was sealed closed on the desiccator and the seeds sterilized for at least 24 hr.

[0472] Sterilized soybean seeds were then imbibed in ddH₂O under sterile conditions at 25° C. for 24 hours before the germination test. For the germination test, 6-8 imbibed seeds were placed on a 100×25 mm deep Petri dish plate containing 50 ml germination media supplemented with or without modified auxin compounds. 1L seed germination media contains 3.21 g GAMBORG B-5 basal medium (PhytoTech), 20 g sucrose, 5 g tissue culture agar, and was pH adjusted to 5.7. Media was autoclaved at 121° C. for 25 min and cooled to 60° C. before the addition of auxin product compounds. Germination was carried out in a Percival growth chamber at 25° C. under 18 hr light and 6 hr dark cycle at 90 to 150 μE/m2/s for 16 days.

[0473] Soybean seeds germinated and grew very well in the media containing no supplemented auxin herbicides. After 16 days, both primary and secondary roots grew very well and elongated deep in the media (control in FIG. 2). In plates where 1 μM dicamba was added, seed germination was arrested as evident by bleaching of cotyledons and malformed and growth arrested roots. Emergence of true leaves and formation of secondary roots was not observed from these seeds. In plates where 10 μM dicamba was added, seed germination did not take place. Instead of root or leaf organ formation, seeds started to produce callus (FIG. 2). In comparison, in plates containing 1 μM or 10 μM of decarboxylated dicamba product 2,5-DCA, seed germination and growth were normal, similar to that of the control plates. Even at 100 μM, 2,5-DCA still did not have any obvious impact on soybean germination and growth (FIG. 2). The results indicate that the decarboxylated dicamba product is not phytotoxic to soybean and that decarboxylation of dicamba can be a mechanism for plants to detoxify dicamba herbicide.

[0474] Phytotoxicity of other major dicamba decarboxylaed products was evaluated using Arabidopsis root growth inhibition assay. 4-chlro-3-methoxy phenol was purchased from Biogene Organics, Inc. (catalog number U06-642-79). 2,5-dichloro phenol was purchased from Sigma-Aldrich (catalog number D70007). Briefly, seeds of Arabidopsis ecotype Columbia (Col-0) were surface sterilized with 70% (v/v) ethanol for 5 minutes and 10% (v/v) bleach for 15 minutes. After being washed three times with distilled water, the seeds were germinated on 1× Murashige and Skoog (MS) medium with a pH of 5.7, 3% (w/v) sucrose, and 0.8% (w/v) agar. After incubation for 3.5 days, the seedlings were transferred to 1× MS medium containing B5 vitamin, 3% (w/v) sucrose, 1.2% (w/v) agar, and filter sterilized compounds was added to the media at 60° C. The concentrations of compounds including dicamba were 0 μM, 1.0 μM, and 10 μM. The seedlings were placed vertically, and the temperature maintained at 23° C. to allow root growth along the surface of the agar, with a photoperiod of 16 h of light and 8 h of dark.

[0475] After 6 days on media, root growth was evaluated. In wild type Arabidopsis, root growth inhibition is expected from auxin herbicide treatment. As shown in FIGS. 3 (B and C), Arabidopsis root growth was greatly affected with dicamba treatment. At 1.0 uM, dicamba arrested the elongation of primary root and the formation of secondary roots. At 10 uM, the inhibitory effect of dicamba on root growth became more severe. Instead of formation of secondary root organ, callus was induced from the roots. Treatment with 4-chloro-3-methoxy phenol at 1.0 uM (FIG. 3D) and 10 uM (FIG. 3E) or 2,5-dichloro phenol at 1.0 uM (FIG. 3F) and 10 uM (FIG. 3G) did not have any effect on the growth of Arabidopsis roots when compared with the control in FIG. 3A.

### Example 3

### Activity and Phylogenetic Relationship of Dicamba Decarboxylase Candidate Proteins

[0476] A total of 108 protein sequences, SEQ ID NO:1 to SEQ ID NO:108 (Table 2), were selected from GenBank analysis (NCBI, www.ncbi.nlm.nih.gov/). The phylogenetic relationship of these sequences was analyzed using CLUSTAL W followed by Neighbor-Joining method as shown in FIG. 4. Coding sequences were designed for expression in E. coli based on the protein sequences and synthesized. Synthesized coding sequences along with N-terminal His-tag coding sequences were cloned into a pET24a-based E. coli expression vector (Invitrogen). The E. coli expression vectors were transformed into BL21 Gold (DE3) (Stratagene) for protein expression. Recombinant E. coli strains were inoculated into 5 ml LB media supplemented with 40 mg/L kanamycin and cultured overnight at 37° C. 0.5 ml of overnight culture was inoculated into 50 mL LB medium plus 40 mg/L kanamycin and grown at 30° C. until OD₆₀₀ reached 0.6. The cultures were induced with 0.2 mM IPTG at 16° C., 230 rpm overnight. The cell cultures were used for dicamba decarboxylation assay directly measuring the formation of ¹⁴CO₂ from decarboxylation of [¹⁴C]-carboxyl-labeled dicamba. A typical cell assay composed of 45 ul induced recombinant cells and 5 ul 20 mM dicamba substrate (50:50 mixture (v:v) of [¹⁴C]-carboxyl-labeled dicamba and non-labeled cold dicamba). ¹⁴CO₂ was captured on Ca(OH)₂-soaked filter paper which was then exposed to a phosphoimage cassette as described in Example 1. The assay results are summarized in Table 2. In total, among the 108 sequences tested, 40 proteins (SEQ ID NO:1, 2, 4, 5, 16, 19, 21, 22, 26, 28, 30, 31, 32, 33, 34, 35, 36, 41, 43, 44, 46, 47, 48, 49, 50, 51, 52, 53, 54, 55, 56, 57, 58, 79, 81, 87, 88, 89, 92, 108) showed decarboxylation activity of dicamba. In FIG. 5 is shown results of a series of ¹⁴CO₂ accumulation over a time course from dicamba decarboxylation reactions using E. coli cells transformed with SEQ ID NO:1.

[0477] To obtain purified protein for activity assays, IPTG-induced cells were harvested by centrifugation at 7,000 rpm for 10 mins Cell pellet from 50 mL of cell culture was frozen and thawed twice and then lysed in 8004 lysis buffer consisting of 50 mM potassium phosphate buffer (pH7.0), 50 μM ZnSO₄, 5% EG, 50 mM KCl, 1 mM DTT, 0.2 mg/ml lysozyme, 1/200 protease inhibitor cocktail (EMD set3, EDTA free), and 1/2,000 endonuclease. Lysate was then centrifuged at 13,000 rpm for 45 min at 4° C. Supernatant was loaded onto 200 μL Ni-NTA columns pre-equilibrated with 10 mM His Buffer containing 25 mM potassium phosphate buffer pH7, 50 μM ZnSO₄, 5% EG, 200 mM KCl, and 10 mM histidine. The columns were let sit at 4° C. until the entire supernatant passed through. Each column was then washed with 200 ul 10 mM His Buffer twice and then 4 times with 800 ul loading buffer consisting of 25 mM potassium phosphate buffer pH7, 50 μM ZnSO₄, 5% EG, 200 mM KCl. Protein was eluted with 1504 of Elution Buffer consisting of 25 mM potassium phosphate buffer pH7, 50 μM ZnSO₄, 5% EG, 100 mM KCl, 100 mM histidine, 10% glycerol. The protein concentration was measured by Bradford assay. Purified protein was used for dicamba decarboxylase activity measurement as described in Example 1. Enzyme kinetic characterization of selected dicamba decarboxylases was determined through GC/MS measurement of 2,5-DCP or PEPC coupled assay as described in Example 1.

TABLE 2
Summary of dicamba decarboxylase activity for SEQ ID NO 1-108^{a}

| SEQ | GeneBank | | | Dicamba |
|---|---|---|---|---|
| ID | Accession | | | Decarboxylase |
| NO | Number | Gene Name | Organism | Activity^{b} |
| 1 | gi: 116667102 | 2,6-Dihydroxybenzoate | Rhizobium sp. | High |
| | | Decarboxylase | MTP-10005 | |
| 2 | gi\|333928717 | o-pyrocatechuate | Serratia sp. | High |
| | | decarboxylase | AS12 | |
| 3 | gi\|300769319 | possible o- | Lactobacillus | Low |
| | | pyrocatechuate | plantarum | |
| | | decarboxylase | subsp. | |
| | | | plantarum | |
| | | | ATCC 14917 | |
| 4 | gi\|331700448 | o-pyrocatechuate | Lactobacillus | High |
| | | decarboxylase | buchneri NRRL | |
| | | | B-30929 | |
| 5 | gi\|297589344 | possible o- | Staphylococcus | High |
| | | pyrocatechuate | aureus subsp. | |
| | | decarboxylase | aureus MN8 | |
| 6 | gi\|332297680 | o-pyrocatechuate | Treponema | No |
| | | decarboxylase | brennaborense | |
| | | | DSM 12168 | |
| 7 | gi\|307611400 | 5-carboxyvanillate | Legionella | No |
| | | decarboxylase | pneumophila | |
| | | | 130b | |
| 8 | gi\|322710070 | 2,3-dihydroxybenzoic | Metarhizium | Low |
| | | acid decarboxylase, | anisopliae | |
| | | putat | ARSEF 23 | |
| 9 | gi\|254450691 | 2,3-dihydroxybenzoic | Octadecabacter | No |
| | | acid decarboxylase | antarcticus 238 | |
| 10 | gi\|298291129 | o-pyrocatechuate | Starkeya novella | Low |
| | | decarboxylase | DSM 506 | |
| 11 | gi\|145237288 | 2,3-dihydroxybenzoic | Aspergillus | Low |
| | | acid decarboxylase | niger CBS | |
| | | | 513.88 | |
| 12 | gi\|339471266 | 2,3 dihydroxybenzoic | Zymoseptoria | No |
| | | acid decarboxylase-like | tritici IPO323 | |
| | | protein | | |
| 13 | gi\|322699386 | 2,3-dihydroxybenzoic | Metarhizium | No |
| | | acid decarboxylase | acridum CQMa | |
| | | dhbD | 102 | |
| 14 | gi\|212530386 | 2,3-dihydroxybenzoic | Talaromyces | Low |
| | | acid decarboxylase, | marneffei | |
| | | putative | ATCC 18224 | |
| 15 | gi\|322702683 | 2,3-dihydroxybenzoic | Metarhizium | Low |
| | | acid decarboxylase, | anisopliae | |
| | | putative | ARSEF 23 | |
| 16 | gi\|312437002 | possible o- | Staphylococcus | High |
| | | pyrocatechuate | aureus subsp. | |
| | | decarboxylase | aureus TCH60 | |
| 17 | gi\|145232495 | 2,3-dihydroxybenzoic | Aspergillus | Low |
| | | acid decarboxylase | niger CBS | |
| | | | 513.88 | |
| 18 | gi\|148360001 | 5-carboxyvanillate | Legionella | Low |
| | | decarboxylase | pneumophila str. | |
| | | | Corby | |
| 19 | gi\|212546025 | 2,3-dihydroxybenzoic | Talaromyces | High |
| | | acid decarboxylase, | marneffei | |
| | | putative | ATCC 18224 | |
| 20 | gi\|52842745 | 5-carboxyvanillate | Legionella | Low |
| | | decarboxylase | pneumophila | |
| | | | subsp. | |
| | | | pneumophila str. | |
| | | | Philadelphia 1 | |
| 21 | gi\|54290091 | reversible 2,6- | Agrobacterium | High |
| | | dihydroxybenzoic acid | tumefaciens | |
| | | decarboxylase | | |
| 22 | gi\|242372227 | possible o- | Staphylococcus | High |
| | | pyrocatechuate | epidermidis | |
| | | decarboxylase | M23864:W1 | |
| 23 | gi\|336041448 | putative 2,3- | Aplysina | Low |
| | | dihydroxybenzoic acid | aerophoba | |
| | | decarboxylase | bacterial | |
| | | | symbiont clone | |
| | | | AANRPS | |
| 24 | gi\|145254185 | 2,3-dihydroxybenzoic | Aspergillus | Low |
| | | acid decarboxylase | niger CBS | |
| | | | 513.88 | |
| 25 | gi\|326318924 | o-pyrocatechuate | Acidovorax | Low |
| | | decarboxylase | avenae subsp. | |
| | | | avenae ATCC | |
| | | | 19860 | |
| 26 | gi\|319795730 | o-pyrocatechuate | Variovorax | High |
| | | decarboxylase | paradoxus EPS | |
| 27 | gi\|169766084 | 2,3-dihydroxybenzoic | Aspergillus | No |
| | | acid decarboxylase | oryzae RIB40 | |
| 28 | gi\|19110430 | 5-carboxyvanillate | Sphingomonas | High |
| | | decarboxylase | paucimobilis | |
| 29 | gi\|254470775 | 2,3-dihydroxybenzoic | Pseudovibrio sp. | No |
| | | acid decarboxylase | JE062 | |
| 30 | gi\|336248046 | o-pyrocatechuate | Enterobacter | High |
| | | decarboxylase | aerogenes | |
| | | | KCTC 2190 | |
| 31 | gi\|325293881 | reversible 2,6- | Agrobacterium | High |
| | | dihydroxybenzoic acid | sp. H13-3 | |
| | | decarboxylase | | |
| 32 | gi\|307323742 | o-pyrocatechuate | Streptomyces | High |
| | | decarboxylase | violaceusniger | |
| | | | Tu 4113 | |
| 33 | gi\|116248886 | amidohydrolase | Rhizobium | High |
| | | | leguminosarum | |
| | | | bv. viciae 3841 | |
| 34 | gi\|339329031 | amidohydrolase | Cupriavidus | High |
| | | | necator N-1 | |
| 35 | gi\|323524953 | amidohydrolase | Burkholderia sp. | High |
| | | | CCGE1001 | |
| 36 | gi\|335034641 | hypothetical protein | Agrobacterium | High |
| | | AGRO_1970 | sp. ATCC | |
| | | | 31749 | |
| 37 | gi\|330820952 | amidohydrolase 2 | Burkholderia | Low |
| | | | gladioli BSR3 | |
| 38 | gi\|239819994 | amidohydrolase 2 | Variovorax | Low |
| | | | paradoxus S110 | |
| 39 | gi\|15889794 | conserved hypothetical | Agrobacterium | No |
| | | protein | fabrum str. C58 | |
| 40 | gi\|111018856 | hypothetical protein | Rhodococcus | Low |
| | | RHA1_ro01859 | jostii RHA1 | |
| 41 | gi\|91787937 | amidohydrolase 2 | Polaromonas sp. | High |
| | | | JS666 | |
| 42 | gi\|222080955 | metal dependent | Agrobacterium | Low |
| | | hydrolase | radiobacter K84 | |
| 43 | gi\|209546111 | amidohydrolase | Rhizobium | High |
| | | | leguminosarum | |
| | | | bv. trifolii | |
| | | | WSM2304 | |
| 44 | gi: 118462508 | amidohydrolase | Mycobacterium | High |
| | | | avium 104 | |
| 45 | gi: 126437094 | amidohydrolase 2 | Mycobacterium | No |
| | | | sp. JLS | |
| 46 | gi: 226364748 | decarboxylase | Rhodococcus | High |
| | | | opacus B4 | |
| 47 | gi: 270265324 | hypothetical protein | Serratia | High |
| | | SOD_m00560 | odorifera 4Rx13 | |
| 48 | gi: 300787436 | amidohydrolase | Amycolatopsis | High |
| | | | mediterranei | |
| | | | U32 | |
| 49 | gi: 302521182 | amidohydrolase 2 | Streptomyces | High |
| | | | sp. SPB78 | |
| 50 | gi: 302526758 | hypothetical protein | Streptomyces | High |
| | | SSMG_03140 | sp. AA4 | |
| 51 | gi: 315441546 | TIM-barrel fold metal- | Mycobacterium | High |
| | | dependent hydrolase | gilvum Spyr1 | |
| 52 | gi: 318057865 | putative decarboxylase | Streptomyces | High |
| | | | sp. SA3_actG | |
| 53 | gi: 322433076 | amidohydrolase | Granulicella | High |
| | | | tundricola | |
| | | | MP5ACTX9 | |
| 54 | gi: 333025132 | putative decarboxylase | Streptomyces | High |
| | | | sp. Tu6071 | |
| 55 | gi: 333928717 | o-pyrocatechuate | Serratia sp. | High |
| | | decarboxylase | AS12 | |
| 56 | gi: 336250281 | hypothetical protein | Enterobacter | High |
| | | EAE_19025 | aerogenes | |
| | | | KCTC 2190 | |
| 57 | gi: 340788176 | amidohydrolase | Collimonas | High |
| | | | fungivorans | |
| | | | Ter331 | |
| 58 | gi: 342859160 | amidohydrolase 2 | Mycobacterium | High |
| | | | colombiense | |
| | | | CECT 3035 | |
| 59 | gi: 163798099 | Aminocarboxymuconate- | alpha | No |
| | | semialdehyde | proteobacterium | |
| | | decarboxylase | BAL199 | |
| 60 | gi: 256396244 | amidohydrolase | Catenulispora | No |
| | | | acidiphila DSM | |
| | | | 44928 | |
| 61 | gi: 359423481 | putative 2-amino-3- | Gordonia | No |
| | | carboxymuconate-6- | amarae NBRC | |
| | | semialdehyde | 15530 | |
| | | decarboxylase | | |
| 62 | gi: 228914687 | 2-amino-3- | Bacillus | No |
| | | carboxymuconate-6- | thuringiensis | |
| | | semialdehyde | serovar | |
| | | decarboxylase | pulsiensis | |
| | | | BGSC 4CC1 | |
| 63 | gi: 238502329 | 2-amino-3- | Aspergillus | Low |
| | | carboxymuconate-6- | flavus | |
| | | semialdehyde | NRRL3357 | |
| | | decarboxylase, putative | | |
| 64 | gi: 293607565 | 2-amino-3- | Achromobacter | Low |
| | | carboxylmuconate-6- | piechaudii | |
| | | semialdehyde | ATCC 43553 | |
| | | decarboxylase | | |
| 65 | gi: 301770693 | PREDICTED: 2-amino- | Ailuropoda | Low |
| | | 3-carboxymuconate-6- | melanoleuca | |
| | | semialdehyde | | |
| | | decarboxylase-like | | |
| 66 | gi: 340375146 | PREDICTED: 2-amino- | Amphimedon | Low |
| | | 3-carboxymuconate-6- | queenslandica | |
| | | semialdehyde | | |
| | | decarboxylase-like | | |
| 67 | gi: 346471897 | hypothetical protein | Amblyomma | Low |
| | | | maculatum | |
| 68 | gi: 163759841 | Aminocarboxymuconate- | Hoeflea | No |
| | | semialdehyde | phototrophica | |
| | | decarboxylase | DFL-43 | |
| 69 | gi: 323358195 | metal-dependent | Microbacterium | No |
| | | hydrolase of the TIM- | testaceum | |
| | | barrel fold | StLB037 | |
| 70 | gi: 339289334 | amidohydrolase 2 | Alicyclobacillus | Low |
| | | | acidocaldarius | |
| | | | subsp. | |
| | | | acidocaldarius | |
| | | | Tc-4-1 | |
| 71 | gi: 254255373 | Aminocarboxymuconate- | Burkholderia | Low |
| | | semialdehyde | dolosa AUO158 | |
| | | decarboxylase | | |
| 72 | gi: 339321612 | unnamed protein | Cupriavidus | Low |
| | | product | necator N-1 | |
| 73 | gi: 269836141 | amidohydrolase 2 | Sphaerobacter | Low |
| | | | thermophilus | |
| | | | DSM 20745 | |
| 74 | gi: 337277884 | hypothetical protein | Ramlibacter | Low |
| | | Rta_02710 | tataouinensis | |
| | | | TTB310 | |
| 75 | gi: 299473403 | conserved unknown | Ectocarpus | Low |
| | | protein | siliculosus | |
| 76 | gi: 328542675 | 4-oxalomesaconate | Polymorphum | No |
| | | hydratase | gilvum SL003B- | |
| | | | 26A1 | |
| 77 | gi: 91780635 | hypothetical protein | Burkholderia | No |
| | | Bxe_C0594 | xenovorans | |
| | | | LB400 | |
| 78 | gi: 311692937 | amidohydrolase 2 | Marinobacter | Low |
| | | | adhaerens HP15 | |
| 79 | gi: 330938296 | hypothetical protein | Pyrenophora | High |
| | | PTT_18638 | teres f. teres 0-1 | |
| 80 | gi: 346327198 | uracil-5-carboxylate | Cordyceps | Low |
| | | decarboxylase | militaris CM01 | |
| 81 | gi: 346975906 | 2-amino-3- | Verticillium | High |
| | | carboxymuconate-6- | dahliae VdLs.17 | |
| | | semialdehyde | | |
| | | decarboxylase | | |
| 82 | gi: 86750218 | amidohydrolase 2 | Rhodopseudomonas | Low |
| | | | palustris | |
| | | | HaA2 | |
| 83 | gi: 353188507 | o-pyrocatechuate | Mycobacterium | Low |
| | | decarboxylase | rhodesiae JS60 | |
| 84 | gi: 359823113 | putative TIM-barrel | Mycobacterium | Low |
| | | fold metal-dependent | rhodesiae NBB3 | |
| | | hydrolase | | |
| 85 | gi: 84685620 | hypothetical protein | Maritimibacter | Low |
| | | 1099457000253_RB2654_06604 | alkaliphilus | |
| | | | HTCC2654 | |
| 86 | gi: 103485558 | amidohydrolase 2 | Sphingopyxis | Low |
| | | | alaskensis | |
| | | | RB2256 | |
| 87 | gi: 334140714 | amidohydrolase | Novosphingobium | High |
| | | | sp. PP1Y | |
| 88 | gi: 298291129 | o-pyrocatechuate | Starkeya novella | High |
| | | decarboxylase | DSM 506 | |
| 89 | gi: 300717179 | amidohydrolase | Erwinia | High |
| | | | billingiae Eb661 | |
| 90 | gi: 189199586 | amidohydrolase 2 | Pyrenophora | Low |
| | | | tritici-repentis | |
| | | | Pt-1C-BFP | |
| 91 | gi: 347828445 | hypothetical protein | Botryotinia | Low |
| | | | fuckeliana | |
| 92 | gi: 256423327 | amidohydrolase 2 | Chitinophaga | Yes |
| | | | pinensis DSM | |
| | | | 2588 | |
| 93 | gi: 312888301 | amidohydrolase 2 | Mucilaginibacter | Low |
| | | | paludis DSM | |
| | | | 18603 | |
| 94 | gi\|118476039 | phosphoribosylaminoimidazole | Bacillus | No |
| | | carboxylase | thuringiensis str. | |
| | | | A1 Hakam | |
| 95 | gi\|116667627 | Alpha-Amino-Beta- | Pseudomonas | No |
| | | Carboxymuconate- | fluorescens | |
| | | Epsilon-Semialdehyde- | | |
| | | Decarboxylase | | |
| 96 | gi\|67515537 | hypothetical protein | Aspergillus | No |
| | | AN0050.2 | nidulans FGSC | |
| | | | A4 | |
| 97 | gi\|347527637 | 4-oxalomesaconate | Sphingobium sp. | No |
| | | hydrat | SYK-6 | |
| 98 | gi\|21233454 | 4-oxalomesaconate | Xanthomonas | No |
| | | hydratase | campestris pv. | |
| | | | Campestris str. | |
| | | | ATCC 33913 | |
| 99 | gi\|83747590 | 4-oxalomesaconate | Ralstonia | No |
| | | hydratase | solanacearum | |
| | | | UW551 | |
| 100 | gi\|88799832 | 4-Oxalomesaconate | Reinekea | No |
| | | hydratase | blandensis | |
| | | | MED297 | |
| 101 | gi\|15605994 | phenylacrylic acid | Aquifex | No |
| | | decarboxylase | aeolicus VF5 | |
| 102 | gi\|254558099 | p-coumaric acid | Lactobacillus | No |
| | | decarboxylase | plantarum | |
| | | | JDM1 | |
| 103 | gi\|83285917 | adenosine deaminase | Plasmodium | No |
| | | | yoelii yoelii | |
| | | | 17XNL | |
| 104 | gi\|259090145 | Adenosine Deaminase | Plasmodial | No |
| | | | Vivax | |
| 105 | gi\|10957545 | hypothetical protein | Deinococcus | No |
| | | DR_C0006 | radiodurans R1 | |
| 106 | gi\|14590967 | hypothetical protein | Pyrococcus | No |
| | | PH1139 | horikoshii OT3 | |
| 107 | gi\|39937755 | 4-oxalomesaconate | Rhodopseudomonas | No |
| | | hydratase | palustris | |
| | | | CGA009 | |
| 108 | gi\|15925570 | hypothetical protein | Staphylococcus | High |
| | | SAV2580 | aureus subsp. | |
| | | | aureus Mu50 | |

^{a}Amino acid “Alanine” was added to all proteins at position 2 to facilitate cloning into the expression vector.
^{b}Dicamba decarboxylation activity description: High, dicamba decarboxylation activity was detected at relatively high level; No, dicamba decarboxylation activity was not detected; Low, dicamba decarboxylation activity was detected at a low level.

### Example 4

### Detection of Various Decarboxylated Products from Reactions with Selected Dicamba Decarboxylases

[0478] Enzymatic decarboxylation reactions, with the exception of orotidine decarboxylase, have not been studied or researched in detail. There is little information about their mechanism or enzymatic rates and no significant work done to improve their catalytic efficiency nor their substrate specificity. Decarboxylation reactions catalyze the release of CO₂ from their substrates which is quite remarkable given the energy requirements to break a carbon-carbon sigma bond, one of the strongest known in nature.

[0479] In examining the structure of dicamba, the carboxylate (—CO₂— or —CO₂H) is of utmost importance to its function. Enzymes were designed that would remove the carboxylate moiety efficiently rendering a significantly different product than dicamba (FIG. 1). Due to a variety of factors during the reaction including stereochemistry and location of general acids and bases as well as longevity of high energy intermediates, multiple products in addition to the simple decarboxylation are possible (FIG. 1). C is the simplest decarboxylation where the CO₂ is replaced by a proton, D is the product after decarboxylation and chlorohydrolase activity, and E is the product after decarboxylation and demethylase or methoxyhydrolase activity. The class of enzymes that was most similar to the desired dicamba decarboxylation was metal-catalyzed nonoxidative decarboxylases (Liu and Zhang, Biochemistry, 45:10407, 2006). This family of enzymes is relatively small but well conserved structurally and catalyzes the decarboxylation of aromatic acids or vinyl acids utilizing an enol stabilizing intermediate (that is not similarly possible to form with dicamba). While mechanisms have been hypothesized based upon the sequence similarity to deaminases (Crystal Structures of Nonoxidative Zinc-dependent 2,6-Dihydroxybenzoate (gamma-Resorcylate) Decarboxylase from Rhizobium sp. Strain MTP-10005″, Journal Biol. Chem. 281:34365-34373 (2006)) as well as from crystallized inhibitors, no work further elucidating the mechanism has been published.

[0480] Dicamba decarboxylases were expressed in E. coli cells and purified as His-tag proteins. Purified proteins were then incubated with dicamba substrate in the reaction buffer for product analysis as described in Example 1. For ¹⁴C assay, [¹⁴C]-carboxyl-labeled dicamba was used as substrate. Non-labeled dicamba was used for all other assays. Formation of four enzymatic reaction products (FIG. 1) was discovered using purified protein of SEQ ID NO:1. The first product is CO₂ which was detected in ¹⁴C assay using [¹⁴C]-carboxyl-labeled dicamba as substrate. The second is the predicted decarboxylated product, 2,5-DCA, which was detected using toluene capturing method followed by GC/MS analysis. The third is a decarboxylated and chlorohydrolyzed product, 4-chloro-3-methoxy phenol, which was detected using LC-MS/MS detection procedure. The fourth product is a decarboxylated and demethylated product, 2,5-DCP, which was detected by GC/MS analysis. Compared to the estimated amount of CO₂ formation (100%) in the reaction using ¹⁴C assay, the relative amount of 2,5-DCA, 4-chloro-3-methoxy phenol, and 2,5-DCP is approximately <1%, <10%, and >80%, respectively. Other dicamba decarboxylases with three major products (CO₂, 4-chloro-3-methoxy phenol, and 2,5-DCP) detected are SEQ ID NO:32, 41, 108, 109, 110, 111, 112, 113, 114, 115, and 116. These proteins were found to catalyze similar reactions of SEQ ID NO:1. The minor decarboxylation product 2,5-DCA was detected from reactions with protein SEQ ID NO:117, 118, 119, 120, 121, or 122, but other products were not detected from these protein reactions. Thus, the reaction mechanism may not be the same for all dicamba decarboxylases.

### Example 5

### Using Rational Design Approach to Obtain or Improve Enzyme Activity for Dicamba Decarboxylation

### A. Developing the Minimal Requirements and Constraints for Dicamba Decarboxylase Active Site and General Computational Design Methods.

[0481] In order to achieve the best dicamba decarboxylase efficiency, computational methods were employed to design the active site to satisfy as many as possible the criteria of catalytic residues as well as substrate binding. Multiple approaches were utilized resulting in many active enzymes across multiple different protein backbones. All of the design calculations were begun utilizing an active site model as seen in FIGS. 9 and 11. This active site model is based on the natural class of transition metal-catalyzing nonoxidative decarboxylases and utilizes a zinc ion along with 4 coordinating side chains. The zinc ion can be replaced by cobalt, iron, nickel, or copper ions as the naturally occurring metal is not conclusively known for all of the enzymes (Huo, et al. Biochemistry. 2012 51:5811-21; Glueck, et al, Chem. Soc. Rev., 2010, 39, 313-328; Liu, et al, Biochemistry. 2006 45:10407-10411; Li, et al, Biochemistry 2006, 45:6628-6634).

[0482] Additionally, while FIG. 10 demonstrates two histidines and two aspartic or glutamic acid side chains, another possibility utilizing three histidines and one aspartate/glutamate was also tested. There are other sidechains in addition to histidine, asparate, and glutamate which can be used to chelate the metal including asparagine, glutamine, cysteine, cysteine and even tyrosine, threonine, and serine. Any combination of these could be used to chelate the metal and make the required catalytic geometry as seen in Table 3. The four side chain-chelated metal complex binds to the carboxylate of dicamba. This weakens the C—C bond enabling the addition of a proton. The proton is donated by the fifth catalytic residue which can be any hydrogen bond donating side-chain similar to the list above plus arginine and is often histidine. Stabilization by the other groups around the ring allows the C—C bond to break, fully releasing the CO₂ and regenerating the enzyme.

[0483] These combinations of histidines and acid were found initially in naturally existing enzyme scaffold proteins and correctly oriented to bind the necessary metal as the enzymes were designed within the naturally occurring decarboxylase family of proteins (Table 2). Substrate and product models were generated using state-of-art small-molecule building software packages such as, but not limited to, SPARTAN, Avogadro and Pymol, starting from equilibrium geometries for molecular parameters including, but not limited to, bond lengths, angles, dihedral angles and atom radii. The dicamba structure, the transition state geometry, and the orientation of the ligands relative to the metal and each other were further minimized using a molecular mechanics force-field such as MMFF94. Additionally, quantum mechanical calculations were performed to obtain the sensitivity of each degree of freedom within the transition state using quantum chemistry software packages such as SPARTAN or Gamess and exploring energies up to 5 kcal/mol higher than the global lowest transition state. This process explored the flexibility, or plasticity, of the transition state for the reaction during the subsequent design steps. The three-dimensional representation of one possible set of catalytic residues and the metal is shown in FIG. 11. The protein scaffold, or backbone, is shown in thin lines. The catalytic residues are shown in a thicker tube representation and the metal is shown as a sphere. There are two other spheres representing either water molecules or the position of the carboxylate oxygens from a dicamba molecule. The hydrogen bond donor depicted is arginine off to the right of the remainder of the active site.

B. Design of Related Sequences without Dicamba Decarboxylase Activity to Now Exhibit Enzymatic Activity.

[0484] In addition to improving already active enzymes, computational design was utilized to introduce activity not present in a wild-type scaffold (Table 4). No starting structure of SEQ ID NO:100 (from x-ray crystallography, NMR, etc.) exists, so it was necessary to build a starting model from the closest homolog with an available structure. Using state-of-the-art sequence search and analysis tools (including, but not limited to, heuristic methods, such as BLAST and its related variants and hidden Markov model methods, such as HMMER and its variants, a close homolog with a structure: SEQ ID NO:104 was identified. Using the sequence alignment of SEQ ID NO:100 to SEQ ID NO:104 given by the sequence search tool, initial threaded models were built, transferring the SEQ ID NO:100 sequence onto the SEQ ID NO:104 backbone, with insertions and deletions in the sequence alignment temporarily left un-modeled and instead representing those regions by backbone that were cut or left out of the model. The threaded models were built by iterating several times across (1) fixed backbone repacking+sidechain minimization followed by (2) tightly constrained minimization over the entire (cut) threaded model where constraints represented by, but not limited to, harmonic or similar types of potential functions, were applied between subsets of nearby heavy atoms. The best, or most successful, threaded models were selected by a feature cutoff (such as total energy) and manual inspection.

[0485] These threaded models were then taken as the starting point for full scale homology modeling, in which the cut regions from insertions/deletions were modeled, or built, using loop modeling techniques. ‘Loop’ here does not refer to coiled or non-structured protein secondary structure. ‘Loop’ refers to a stretch of protein backbone that must critically maintain appropriate geometic and chemical connection between two fixed stretches of backbone, one upstream, and one downstream in the linear sequence. It is important to note that SEQ ID NO:100 (and SEQ ID NO:104 and suspect that most of the sequences presented herein) is a dimer, so this full reconstruction was done as a dimer. To reduce computational costs, loops were only built on one monomer in the presence of the other monomer; this was valid in the case of SEQ ID NO:100 since the distance between the active sites and the dimer interface ensured that the loops did not interact between monomers, otherwise modeling the loops on both monomers simultaneously would likely have been a necessity. For SEQ ID NO:100, the primary loops to be modeled were the two loops at the active site. Loops were built using state-of-the-art loop modeling techniques including, but not limited to, algorithms inspired from the robotics field such as, analytical loop closure, as well as, fragment insertion based techniques. Models were built and subsequently clustered based on the loop positions, and best models were picked by feature cutoff including, but not limited to, total energy, energies of the loop, measures of reasonable loop geometry) and manual inspection. These models were used as starting structures for probing SEQ ID NO:100 further as well as for design.

[0486] For loop based designs, two approaches were used pursued; (1) the best full homology models were taken for substrate/transition state docking and fixed backbone design and (2) the substrate was docked into either the (cut) threaded model or a full homology model based on reaction specific constraints followed by building or rebuilding of loops of native and non-native lengths in combination with sequence design to accommodate and stabilize the docked substrate/transition state. Both of these approaches were followed by additional rounds of refinement through computational enzyme design. To narrow the search space for loops, initial scanning of loop lengths was performed using a lower resolution model and lower resolution scoring function—loops of different lengths were built and evaluated based on measures including, but not limited to, degree of successful closure and reasonable geometries of the loop. These lengths were then used as the lengths for approach (2). SEQ ID NO:95 had an existing crystal structure (PDB IDs:2hbv and 2hbx) but was not active for dicamba decarboxylation so its crystal structures were used used directly as the basis for the design of the active site.

[0487] Sequence design steps, including computational enzyme design, proceeded in the following manner. The amino acid identities of the sidechains within and surrounding the active site (not included in the five catalytic residues) were optimized using a design algorithm utilizing a Monte Carlo optimization with a high resolution scoring function and employing a discrete rotamer representation of the sidechains using an extended version of the Dunbrack rotamer library similar to that used for 8,340,951 and US Application Publication No. US2009/0191607, both of which are herein incorporated by reference in their entirity. During this optimization, we impose different allowed behaviors on several subsets of residues: the subset of residues whose amino acid identities and sidechain conformations are allowed to vary are termed as “redesigned,” while a second subset of residues whose amino acid identities are kept fixed but whose sidechain conformations are allowed to vary are term as “repacked,” while those residues whose amino acid identity and sidechain conformations are maintained are termed “fixed.” We iterate between this discrete sequence optimization and a continuous optimization with a high resolution scoring function in which the dicamba rigid body degrees of freedom and the sidechain torsion angle degrees of freedom of the amino acids are allowed to vary simultaneously. In both discrete sequence optimization and the continuous optimization, we critically include in the high resolution scoring function a series of catalytic constraint functions utilizing the constraints observed in FIG. 12 and Table 3. We note here that the continuous optimization is essential to the subsequent assessment of the catalytic efficacy of the design.

[0488] To further optimize interactions (H-bonding or packing) that may still missing at the end of the normal design process, we generate additional design variants by introducing small perturbations to the dicamba degrees of freedom to explore slightly different rigid body orientations. Since these perturbations change the orientation of the dicamba to the catalytic sidechains, the conformations of the catalytic sidechains are re-optimized to ensure they are still within the defined geometric constraints. The remaining pocket is subsequently redesigned and refined as described above using the amino acid identities of the pre-perturbed design as the starting sequence. These perturbed and refined designs provide slight variations on the initial design which may have optimized properties. We iterate this process multiple times: small docking perturbations, pocket design and refinement in order to improve hydrogen bonding and packing interactions. Results of this approach include SEQ ID NOS: 117-122.

c. Design of Low Level Natural Enzymes with Dicamba Decarboxylase Activity to Higher Activity Levels.

[0489] For one set of the designed enzymes, simple computational design was done to improve the catalytic activity (for example SEQ ID NO: 109; Table 5). In this case, computational docking of the active site as shown in FIGS. 9 and 10 into SEQ ID NO: 1 is done while the identities of protein residues (excluding functional residues) are altered as to stabilize the resulting protein and/or provide additional favorable atomic contacts to the placed ligand and/or transition state or buttress the position of functional residues. This design methodology and technology are covered substantially in U.S. Pat. No. 8,340,951 and US Application Publication No. US2009/0191607, both of which are herein incorporated by reference.

[0490] At the end of the computational docking or computational docking and design steps, the structural protein models are ranked by score and/or structural features, and their amino acid sequences selected for further experimental characterization. This process resulted in sequences like SEQ ID NO:109 which were more active than their parent sequence. The dicamba molecule shows a change in orientation within the active site probably related to the improved activity. The designed mutation is asparagine 235 to valine (N235V). On the face of it, this mutation may not seem dramatic; however, using computational modeling and design it becomes clear that the shape of the pocket changes significantly and thus favors product formation for dicamba.

### D. Use of Computational Protein Backbone Structural Redesign in Order to Improve or Enable Enzymatic Activity.

[0491] In addition to homolog modeling and using computational design techniques to introduce dicamba decarboxylase activity where the parent enzyme scaffold did not have activity, we applied additional computational modeling and design methods including loop remodeling and redesign (restructuring loops to bind the substrate more tightly) and loop grafting (for example, up to 35 amino acids transferred) to introduce the necessary interactions for substrate recognition. In SEQ ID NO:1 we had the advantage of knowing more information: the crystal structure of the native protein, so no homology model needed to be built, and a more accurate picture of how the substrate/transition state fit into the active site. We identified (similar to SEQ ID NO:100), two (interacting) loops in the active site amenable to flexible backbone design. Here we took as the starting model the native SEQ ID NO:100 crystal structure (PDB ID:2gwg) with our transition state docked, and built (or rebuilt) those two loops with native and non-native lengths to accommodate and stabilize the docked substrate/transition state. Several of the possible loops sampled are shown in FIG. 13. This was followed by additional rounds of refinement using computational enzyme design resulting in, for example, SEQ ID NO: 110-115. Similarly as above, we used low resolution scanning of appropriate loop lengths to narrow the search space. For SEQ ID NO: 116 computational design modeled and designed a new 35 amino acid N-terminal loop based on SEQ ID NO:100 and were able to introduce improved dicamba decarboxylase activity into a parent enzyme (SEQ ID NO:41) possessing natural activity (Table 5). In total using computational design, we successfully introduced novel activity or improved the enzyme efficiency in five enzyme backbones introducing anywhere between 1 and 35 mutations to the parent sequence.

TABLE 4
Protein variants designed to introduce dicamba decarboxylation activity

| | | | Dicamba |
|---|---|---|---|
| SEQ ID | | | Decarboxylation |
| NO | Alias | Description | activity |
| 95 | DC.5.001 | Alpha-Amino-Beta- | No |
| | | Carboxymuconate-Epsilon- | |
| | | Semialdehyde-Decarboxylase | |
| 117 | DC.5.008 | Design variant of | Yes |
| | | SEQ ID NO: 95 | |
| 118 | DC.5.033 | Design variant of | Yes |
| | | SEQ ID NO: 95 | |
| 119 | DC.5.034 | Design variant of | Yes |
| | | SEQ ID NO: 95 | |
| 100 | DC.12.001 | 4-Oxalomesaconate | No |
| | | hydratase | |
| 120 | DC.12.002 | Design variant of | Yes |
| | | SEQ ID NO: 100 | |
| 121 | DC.12.014 | Design variant of | Yes |
| | | SEQ ID NO: 100 | |
| 122 | DC.12.103 | Design variant of | Yes |
| | | SEQ ID NO: 100 | |

TABLE 5
Designed protein variants with improved dicamba decarboxylase enzymatic
activity

| | | | | Percent Activity |
|---|---|---|---|---|
| | | | Dicamba | Improvement |
| SEQ ID | | | Decarboxylation | Over Parent |
| NO | Alias | Description | activity | (%) |
| 1 | DC.4.001 | 2,6-Dihydroxybenzoate Decarboxylase | Yes | 100 |
| 109 | DC.4.032 | Design variant of SEQ ID NO: 1 | Yes | 234 |
| 110 | DC.4.111 | Design variant of SEQ ID NO: 1 | Yes | 277 |
| 111 | DC.4.112 | Design variant of SEQ ID NO: 1 | Yes | 237 |
| 112 | DC.4.113 | Design variant of SEQ ID NO: 1 | Yes | 219 |
| 113 | DC.4.114 | Design variant of SEQ ID NO: 1 | Yes | 224 |
| 114 | DC.4.116 | Design variant of SEQ ID NO: 1 | Yes | 221 |
| 115 | DC.4.161 | Design variant of SEQ ID NO: 1 | Yes | 202 |
| 41 | DC.30.001 | amidohydrolase 2 | Yes | 100 |
| 116 | DC.30.007 | Design variant of SEQ ID NO: 41 | Yes | 220 |

[0492] Table 6 lists the important and conserved catalytic residues for activity within the sequences according to sequence alignment algorithms. Catalytic Residues #1-4 serve primarily to coordinate the metal within the active site. Most frequently they are histidine, aspartic acid, and glutamic acid. Catalytic Residue #5 serves as the proton donor which adds the proton to the aromatic ring displacing the carboxylate. These five catalytic residues are critical to the dicamba decarboxylase activity.

TABLE 6

| | | | | | | | | | | Cat. Residue #5 | |
|---|---|---|---|---|---|---|---|---|---|---|---|
| | Enzymatic | Cat. Residue #1 | | Cat. Residue #2 | | Cat. Residue #3 | | Cat. Residue #4 | | (Proton Donor) | |
| SEQ | Detection | | Residue | | Residue | | Residue | | Residue | | Residue |
| NO. | level | Identity | No. | Identity | No. | Identity | No. | Identity | No. | Identity | No. |
| 1 | High | GLU | 9 | HIS | 11 | HIS | 165 | ASP | 287 | HIS | 219 |
| 2 | High | GLU | 8 | HIS | 10 | HIS | 181 | ASP | 305 | HIS | 241 |
| 3 | Low | GLU | 8 | HIS | 10 | HIS | 171 | ASP | 296 | HIS | 233 |
| 4 | High | GLU | 8 | HIS | 10 | HIS | 173 | ASP | 298 | HIS | 235 |
| 5 | High | GLU | 17 | HIS | 19 | HIS | 181 | ASP | 304 | HIS | 242 |
| 6 | No | — | | — | | HIS | 95 | ASP | 216 | HIS | 155 |
| 7 | No | GLU | 7 | HIS | 9 | HIS | 181 | ASP | 302 | HIS | 233 |
| 8 | Low | GLU | 9 | ALA* | 11 | HIS | 170 | ASP | 298 | HIS | 225 |
| 9 | No | GLU | 9 | HIS | 11 | HIS | 161 | ASP | 280 | HIS | 214 |
| 10 | Low | GLU | 9 | HIS | 11 | HIS | 160 | ASP | 280 | HIS | 213 |
| 11 | Low | GLU | 9 | ALA | 11 | HIS | 168 | ASP | 294 | HIS | 223 |
| 12 | No | GLU | 9 | ALA | 11 | HIS | 168 | ASP | 292 | HIS | 223 |
| 13 | No | GLU | 9 | ALA | 11 | HIS | 166 | ASP | 290 | HIS | 221 |
| 14 | Low | GLU | 9 | ALA | 11 | HIS | 170 | ASP | 299 | HIS | 225 |
| 15 | Low | — | | — | | HIS | 79 | ASP | 204 | HIS | 140 |
| 16 | High | GLU | 15 | HIS | 17 | HIS | 181 | ASP | 305 | HIS | 242 |
| 17 | Low | GLU | 9 | ALA | 11 | HIS | 171 | ASP | 302 | HIS | 228 |
| 18 | Low | GLU | 7 | HIS | 9 | HIS | 181 | ASP | 303 | HIS | 233 |
| 19 | High | GLU | 9 | HIS | 11 | HIS | 151 | ASP | 276 | HIS | 213 |
| 20 | Low | GLU | 7 | HIS | 9 | HIS | 181 | ASP | 303 | HIS | 233 |
| 21 | High | GLU | 9 | HIS | 11 | HIS | 165 | ASP | 288 | HIS | 219 |
| 22 | High | GLU | 6 | HIS | 8 | HIS | 172 | ASP | 296 | HIS | 233 |
| 23 | Low | GLU | 60 | HIS | 62 | HIS | 207 | ASP | 334 | HIS | 268 |
| 24 | Low | GLU | 9 | ALA | 11 | HIS | 170 | ASP | 299 | HIS | 225 |
| 25 | Low | GLU | 9 | HIS | 11 | HIS | 165 | ASP | 288 | HIS | 219 |
| 26 | High | GLU | 15 | HIS | 17 | HIS | 171 | ASP | 292 | HIS | 225 |
| 27 | No | GLU | 9 | ALA | 11 | HIS | 168 | ASP | 294 | HIS | 223 |
| 28 | High | GLU | 8 | ALA | 10 | HIS | 174 | ASP | 297 | HIS | 227 |
| 29 | No | GLU | 45 | HIS | 47 | HIS | 196 | ASP | 323 | HIS | 257 |
| 30 | High | GLU | 9 | HIS | 11 | HIS | 170 | ASP | 295 | HIS | 225 |
| 31 | High | GLU | 9 | HIS | 11 | HIS | 165 | ASP | 288 | HIS | 219 |
| 32 | High | GLU | 8 | HIS | 10 | HIS | 169 | ASP | 295 | HIS | 230 |
| 33 | High | GLU | 9 | HIS | 11 | HIS | 165 | ASP | 288 | HIS | 219 |
| 34 | High | GLU | 9 | HIS | 11 | HIS | 165 | ASP | 288 | HIS | 219 |
| 35 | High | GLU | 12 | HIS | 14 | HIS | 168 | ASP | 291 | HIS | 222 |
| 36 | High | GLU | 9 | HIS | 11 | HIS | 165 | ASP | 288 | HIS | 219 |
| 37 | Low | GLU | 13 | HIS | 15 | HIS | 168 | ASP | 291 | HIS | 222 |
| 38 | Low | GLU | 9 | HIS | 11 | HIS | 165 | ASP | 288 | HIS | 219 |
| 39 | No | GLU | 9 | HIS | 11 | HIS | 165 | ASP | 288 | HIS | 219 |
| 40 | Low | GLU | 9 | HIS | 11 | HIS | 168 | ASP | 291 | HIS | 222 |
| 41 | High | GLU | 9 | HIS | 11 | HIS | 165 | ASP | 288 | HIS | 219 |
| 42 | Low | GLU | 9 | HIS | 11 | HIS | 165 | ASP | 288 | HIS | 219 |
| 43 | High | GLU | 9 | HIS | 11 | HIS | 165 | ASP | 288 | HIS | 219 |
| 44 | High | GLU | 8 | HIS | 10 | HIS | 166 | ASP | 292 | HIS | 227 |
| 45 | No | — | | — | | HIS | 80 | ASP | 204 | HIS | 140 |
| 46 | High | GLU | 8 | HIS | 10 | HIS | 169 | ASP | 294 | HIS | 229 |
| 47 | High | GLU | 8 | HIS | 10 | HIS | 181 | ASP | 306 | HIS | 241 |
| 48 | High | GLU | 10 | HIS | 12 | HIS | 167 | ASP | 290 | HIS | 227 |
| 49 | High | GLU | 8 | HIS | 10 | HIS | 169 | ASP | 295 | HIS | 230 |
| 50 | High | GLU | 8 | HIS | 10 | HIS | 168 | ASP | 294 | HIS | 229 |
| 51 | High | GLU | 8 | HIS | 10 | HIS | 159 | ASP | 283 | HIS | 219 |
| 52 | High | GLU | 8 | HIS | 10 | HIS | 169 | ASP | 295 | HIS | 230 |
| 53 | High | GLU | 8 | HIS | 10 | HIS | 159 | ASP | 283 | HIS | 219 |
| 54 | High | GLU | 8 | HIS | 10 | HIS | 169 | ASP | 295 | HIS | 230 |
| 55 | High | GLU | 8 | HIS | 10 | HIS | 181 | ASP | 306 | HIS | 241 |
| 56 | High | GLU | 8 | HIS | 10 | HIS | 181 | ASP | 306 | HIS | 241 |
| 57 | High | GLU | 8 | HIS | 10 | HIS | 182 | ASP | 307 | HIS | 242 |
| 58 | High | GLU | 8 | HIS | 10 | HIS | 155 | ASP | 280 | HIS | 215 |
| 59 | No | HIS | 9 | HIS | 11 | HIS | 174 | ASP | 296 | ASN | 234 |
| 60 | No | HIS | 33 | HIS | 35 | HIS | 188 | ASP | 302 | HIS | 239 |
| 61 | No | HIS | 27 | HIS | 29 | HIS | 194 | ASN | 317 | HIS | 249 |
| 62 | No | — | | — | | HIS | 136 | ASP | 51 | HIS | 186 |
| 63 | Low | — | | — | | HIS | 171 | ASP | 296 | HIS | 225 |
| 64 | Low | HIS | 9 | HIS | 11 | HIS | 177 | ASP | 294 | HIS | 228 |
| 65 | Low | HIS | 7 | HIS | 9 | HIS | 175 | ASP | 292 | HIS | 225 |
| 66 | Low | HIS | 10 | HIS | 12 | HIS | 178 | ASP | 295 | HIS | 228 |
| 67 | Low | HIS | 16 | HIS | 18 | HIS | 185 | ASP | 302 | HIS | 235 |
| 68 | No | HIS | 7 | HIS | 9 | HIS | 174 | ASP | 290 | HIS | 224 |
| 69 | No | HIS | 14 | HIS | 16 | HIS | 185 | ASP | 300 | HIS | 235 |
| 70 | Low | HIS | 12 | HIS | 14 | HIS | 179 | ASP | 294 | HIS | 228 |
| 71 | Low | — | | — | | HIS | 241 | ASP | 356 | HIS | 291 |
| 72 | Low | HIS | 53 | HIS | 55 | HIS | 219 | ASP | 334 | HIS | 269 |
| 73 | Low | HIS | 7 | HIS | 9 | HIS | 172 | ASP | 287 | HIS | 222 |
| 74 | Low | HIS | 8 | HIS | 10 | HIS | 172 | ASP | 290 | HIS | 224 |
| 75 | Low | TYR | 7 | HIS | 9 | HIS | 163 | ASP | 285 | HIS | 220 |
| 76 | No | PHE | 8 | HIS | 10 | HIS | 163 | ASP | 294 | HIS | 218 |
| 77 | No | HIS | 7 | HIS | 9 | HIS | 191 | ASN | 310 | HIS | 245 |
| 78 | Low | HIS | 7 | HIS | 9 | HIS | 195 | ASN | 313 | HIS | 249 |
| 79 | High | GLU | 15 | HIS | 17 | GLU | 160 | ASN | 285 | HIS | 219 |
| 80 | Low | HIS | 13 | HIS | 15 | HIS | 196 | ASP | 326 | HIS | 252 |
| 81 | High | HIS | 13 | HIS | 15 | HIS | 196 | ASP | 326 | HIS | 253 |
| 82 | Low | GLU | 12 | HIS | 14 | HIS | 158 | ASP | 281 | HIS | 217 |
| 83 | Low | GLU | 7 | HIS | 9 | HIS | 158 | ASP | 284 | HIS | 215 |
| 84 | Low | GLU | 8 | HIS | 10 | HIS | 159 | ASP | 285 | HIS | 216 |
| 85 | Low | GLU | 13 | GLY | 15 | HIS | 169 | ASP | 292 | HIS | 222 |
| 86 | Low | GLU | 27 | ALA | 29 | HIS | 198 | ASP | 321 | HIS | 251 |
| 87 | High | GLU | 25 | ALA | 27 | HIS | 194 | ASP | 320 | HIS | 247 |
| 88 | High | GLU | 8 | HIS | 10 | HIS | 160 | ASP | 281 | HIS | 213 |
| 89 | High | GLU | 49 | HIS | 51 | HIS | 202 | ASP | 322 | HIS | 255 |
| 90 | Low | GLU | 36 | HIS | 38 | HIS | 206 | ASP | 336 | HIS | 267 |
| 91 | Low | GLU | 55 | HIS | 57 | HIS | 227 | ASP | 359 | HIS | 281 |
| 92 | High | GLU | 8 | HIS | 10 | HIS | 162 | ASP | 290 | HIS | 224 |
| 93 | Low | GLU | 20 | HIS | 22 | HIS | 174 | ASP | 302 | HIS | 236 |
| 94 | No | — | | — | | VAL | 94 | ASP | 301 | LYS | 126 |
| 95 | No | HIS | 10 | HIS | 12 | HIS | 178 | ASP | 295 | HIS | 229 |
| 96 | No | HIS | 9 | HIS | 11 | HIS | 201 | ASP | 332 | HIS | 259 |
| 97 | No | HIS | 9 | HIS | 11 | HIS | 179 | GLU | 285 | HIS | 224 |
| 98 | No | HIS | 7 | HIS | 9 | HIS | 178 | GLU | 284 | HIS | 223 |
| 99 | No | HIS | 7 | HIS | 9 | HIS | 179 | GLU | 285 | HIS | 224 |
| 100 | No | HIS | 7 | HIS | 9 | HIS | 180 | GLU | 286 | HIS | 225 |
| 101 | No | — | | — | | VAL | 89 | VAL | 171 | GLU | 113 |
| 102 | No | — | | — | | HIS | 42 | ASP | 143 | HIS | 331 |
| 103 | No | — | | — | | HIS | 147 | ASP | 312 | HIS | 228 |
| 104 | No | — | | — | | HIS | 146 | ASP | 311 | HIS | 227 |
| 105 | No | HIS | 6 | HIS | 8 | HIS | 107 | ASP | 195 | TYR | 149 |
| 106 | No | TYR | 29 | SER | 31 | TYR | 251 | ASP | 417 | ALA | 332 |
| 107 | No | HIS | 7 | HIS | 9 | HIS | 179 | GLU | 285 | HIS | 224 |
| 108 | High | GLU | 7 | HIS | 9 | HIS | 171 | ASP | 295 | HIS | 232 |
| 109 | High | GLU | 9 | HIS | 11 | HIS | 165 | ASP | 287 | HIS | 219 |
| 110 | High | GLU | 9 | HIS | 11 | HIS | 165 | ASP | 287 | HIS | 219 |
| 111 | High | GLU | 9 | HIS | 11 | HIS | 165 | ASP | 287 | HIS | 219 |
| 112 | High | GLU | 9 | HIS | 11 | HIS | 165 | ASP | 287 | HIS | 219 |
| 113 | High | GLU | 9 | HIS | 11 | HIS | 165 | ASP | 287 | HIS | 219 |
| 114 | High | GLU | 9 | HIS | 11 | HIS | 165 | ASP | 287 | HIS | 219 |
| 115 | High | GLU | 9 | HIS | 11 | HIS | 163 | ASP | 285 | HIS | 217 |
| 116 | High | GLU | 9 | HIS | 11 | HIS | 165 | ASP | 287 | HIS | 219 |
| 117 | High | HIS | 7 | HIS | 9 | HIS | 178 | ASP | 294 | GLY*** | 229 |
| 118 | High | HIS | 7 | HIS | 9 | HIS | 178 | ASP | 294 | HIS | 229 |
| 119 | High | HIS | 7 | HIS | 9 | HIS | 178 | ASP | 294 | HIS | 229 |
| 120 | High | HIS | 7 | HIS | 9 | HIS | 180 | GLU | 286 | HIS | 225 |
| 121 | High | HIS | 7 | HIS | 9 | HIS | 180 | GLU | 286 | HIS | 225 |
| 122 | High | HIS | 7 | HIS | 9 | HIS | 180 | ASP | 286 | HIS | 225 |
| 123 | High | GLU | 9 | HIS | 11 | HIS | 165 | ASP | 287 | HIS | 219 |
| 124 | High | GLU | 9 | HIS | 11 | HIS | 165 | ASP | 287 | HIS | 219 |
| 125 | High | GLU | 9 | HIS | 11 | HIS | 165 | ASP | 287 | HIS | 219 |
| 126 | High | GLU | 9 | HIS | 11 | HIS | 165 | ASP | 287 | HIS | 219 |
| 127 | High | GLU | 9 | HIS | 11 | HIS | 165 | ASP | 287 | HIS | 219 |
| 128 | High | GLU | 9 | HIS | 11 | HIS | 165 | ASP | 287 | HIS | 219 |
| 129 | High | GLU | 9 | HIS | 11 | HIS | 165 | ASP | 287 | HIS | 219 |

[0493] Table 3 provides the distance constraints are the inter-atomic distances between the Nδ (ND) or Nε (NE) of histidine or the Oδ (OD) of aspartate or Oε (OE) of glutamate and the transition metal (often, Zn²⁺) in the active site. For Residue #5 which donates the proton to the aromatic ring during the decarboxylation step, the distance constraints are between the Nδ (ND) or Nε (NE) of histidine or the Oδ (OD) of aspartate or Oε (OE) of glutamate and the metal as well the distance to the water in the public crystal structures or the presumed dicamba carboxylate oxygen when the enzymes are binding and acting upon dicamba. The general case and natural diversity is shown first followed by examples of six structures in the Protein Data Bank that exhibit the needed dicamba decarboxylase catalytic geometry.

TABLE 3

| General | | | | | |
|---|---|---|---|---|---|
| Constraints for | | | | | |
| dicamba | | | | | |
| decarboxylases | RESIDUE #1 | RESIDUE #2 | RESIDUE #3 | RESIDUE #4 | RESIDUE #5 |
| | GLU | HIS | HIS | ASP | HIS |
| | HIS | ASP | ASP | GLU | ASP |
| | ASP | GLU | GLU | HIS | GLU |
| | TYR | | | | |
| Median | 2.15 | 2.15 | 2.30 | 2.15 | 4.5 |
| distance to | | | | | |
| metal atom | | | | | |
| (Angstroms) | | | | | |
| Observed | 2.00-3.10 | 2.00-3.20 | 2.00-2.50 | 2.00-3.50 | 3.3-4.9 |
| Values | | | | | |

TABLE 10
Geometries from a publicly available database (The RCSB Protein Data Bank):

| | | | RESI- | | RESI- | | RESI- | | RESI- | | RESI- | RESI- |
|---|---|---|---|---|---|---|---|---|---|---|---|---|
| | | | DUE #1 | | DUE #2 | | DUE #3 | | DUE #4 | | DUE #5 | DUE #5 |
| | | | Distance | | Distance | | Distance | | Distance | | Distance | Distance to |
| | | RESI- | to metal | RESI- | to metal | RESI- | to metal | RESI- | to metal | RESI- | to metal | 5^{th} |
| | | DUE #1 | atom | DUE #2 | atom | DUE #3 | atom | DUE #4 | atom | DUE #5 | atom | coordination |
| | | Amino | (Ang- | Amino | (Ang- | Amino | (Ang- | Amino | (Ang- | Amino | (Ang- | atom** |
| SEQ ID | PDB ID | Acid ID | stroms) | Acid ID | stroms) | Acid ID | stroms) | Acid ID | stroms) | Acid ID | stroms) | (Angstroms) |
| 1 | 2dvt | GLU 8 | 2.02 | HIS 10 | 2.18 | HIS 164 | 2.12 | ASP 287 | 2.33 | HIS 218 | 4.37 | 5.05 |
| 95 | 2hbv | HIS 9 | 2.11 | HIS 11 | 2.19 | HIS 177 | 2.16 | ASP 294 | 2.13 | HIS 228 | 3.26 | 2.52 |
| 130 | 3nur* | GLU 28 | 2.15 | HIS 30 | 2.34 | HIS 192 | 2.34 | ASP 316 | 2.13 | HIS 253 | 4.98 | 3.22 |
| 131 | 3ij6 | TYR 6 | 3.07 | HIS 10 | 3.16 | HIS 160 | 2.36 | ASP 262 | 2.10 | HIS 205 | 4.83 | 2.92 |
| 107 | 2gwg | HIS 6 | 2.23 | HIS 8 | 2.20 | HIS 178 | 2.45 | GLU 284 | 2.45 | HIS 223 | 4.87 | 2.88 |
| 132 | 2imr | HIS 97 | 2.13 | HIS 99 | 2.07 | HIS 238 | 2.08 | ASP 352 | 3.35 | HIS 301 | 4.40 | 3.02 |

*3nur has a Ca++ metal in the active site and is nearly identical to SEQ ID NOS: 5, 16, and 108
**Distance measured from the side-chain atom to the Oxygen atom from the water molecule filling the 5^{th} coordination position on the Zn-atom in the crystal structure

[0494] In FIG. 12, the constraints for the distances between the key atoms of each sidechain, metal, and dicamba transition state are shown. The angles and torsions are difficult to render within one flat figure, but can be easily viewed for each interaction in Table 3. The represented distances represent the ideal distance as calculated from existing enzyme structures in combination with quantum mechanical calculations. In addition to the ideal value, calculations are done to estimate how far from the ideal each geometric parameter/constraint is allowed to diverge. These tolerances are shown in Table 3. The angles and torsions are similarly allowed to deviate somewhat from their ideal geometries in order to account for small changes in protein structure. The x-ray crystal structure for SEQ ID NO: 1 agrees closely with these values. The other dicamba decarboxylases may have slightly different catalytic residue identities, but the geometry of the active sites are very tightly conserved for all of the active enzymes as seen from the residue information in Table 6 as well as the computationally designed decarboxylases SEQ ID NO: 109-122 which use this idealized geometry during the enzyme design process.

### Example 6

### Saturated Mutagenesis of Dicamba Decarboxylase SEQ ID NO: 109

[0495] To discover amino acid positions on SEQ ID NO:109 where point mutations increase the activity of dicamba decarboxylation, saturation mutagenesis using NNK codons (N=A, T, G, or C; K=G or T) was performed along the entire length of the gene. NNK codons are used frequently for saturation mutagenesis to yield 32 possible codons to encode all 20 amino acids while minimizing the stop codons introduced. A total of 15,088 point mutants (46 randomly picked point mutants per amino acid position) were selected and the resulting protein variants were examined for their dicamba decarboxylation activity. Among the variants, 268 point mutations at 116 amino acid positions resulted in a 0.7- to 2.7-fold increase in dicamba decarboxylation activity (Table 7). 0.7-fold activity was used as the cut-off activity level because it represents one standard deviation below the average activity of SEQ ID NO:109. The top 30 point mutations from 14 amino acid positions resulted in more than 2.0-fold higher activity compared to SEQ ID NO:109. These 30 point mutations are: G27A, G27S, G27T, L38I, D42A, D42M, D42S, G52E, N61A, N61G, N61S, A64G, A64S, L127M, V238G, L240A, L240D, L240E, S298A, S298T, D299A, A303C, A303E, A303S, G327L, G327Q, G327V, A328D, A328R, and A328S. N61A was found to be 17-fold more active in k_{cat} while keeping K_{M} unchanged as compared with the template SEQ ID NO:109 (FIG. 6). The distribution of all 268 neutral/beneficial changes is shown in FIG. 7. Flexible positions and regions were discovered where multiple neutral or beneficial amino acid changes were found. For example, 8 neutral/beneficial amino acid changes were found at amino acid positions 27, 42, and 43 on SEQ ID NO:109. Positions in the N-terminal region are in general more amenable to amino acid changes. Other untested amino acid changes may also increase activity.

[0496] In some positions, only one point mutation was found to increase the protein activity (Table 7). For example, E16A, P63V, L104M, P107V, L127M, N214Q, V235I, D299A, N302A, and V312L each represent the only beneficial amino acid changes at their respective amino acid position. While these changes are beneficial for dicamba decarboxylation activity of greater than 1.8-fold as compared to the unchanged template SEQ ID NO:109, the other point mutations evaluated at these positions had a negative impact on the activity. The middle part of the protein is in general less amenable to amino acid changes as compared with the N-terminal end or the C-terminal end of the protein. For example, one region with a span of 72 AA positions in the middle part of the protein (position 139-210) did not tolerate much change as only 8 neutral/beneficial changes were found. Some regions in the protein, i.e. position 154-166 and 196-211 did not tolerate mutations as all variants showed much reduced activity. Region 267-275, a helix on the protein structure (FIG. 8) involved in the formation of the functional tetramer protein, theoretically would not tolerate much change. In fact, only one amino acid change in this region was found in I272V with 0.8-fold activity of the SEQ ID NO:109.

TABLE 7
Neutral or beneficial point mutations for SEQ ID NO: 109

| Amino | | Altered | | STDEV of | Variant |
|---|---|---|---|---|---|
| Acid | Amino Acid of | Amino | Average Activity (Fold | Average | Ranking by |
| Position | SEQ ID NO: 109 | Acid | of SEQ ID NO: 109) | Activity | Activity |
| 3 | Q | G | 1.2 | 0.2 | 181 |
| 3 | Q | M | 1.1 | 0.2 | 201 |
| 5 | K | E | 0.9 | 0.2 | 245 |
| 5 | K | I | 1.0 | 0.0 | 234 |
| 5 | K | L | 0.8 | 0.0 | 255 |
| 5 | K | W | 0.9 | 0.1 | 236 |
| 7 | A | C | 1.3 | 0.1 | 151 |
| 12 | F | M | 1.3 | 0.7 | 158 |
| 12 | F | V | 1.2 | 0.0 | 187 |
| 12 | F | W | 1.2 | 0.2 | 183 |
| 13 | A | C | 1.0 | 0.2 | 229 |
| 15 | P | A | 0.9 | 0.3 | 248 |
| 15 | P | D | 1.0 | 0.1 | 220 |
| 15 | P | E | 1.0 | 0.1 | 224 |
| 15 | P | Q | 1.0 | 0.1 | 232 |
| 15 | P | T | 1.1 | 0.2 | 212 |
| 16 | E | A | 1.8 | 0.5 | 49 |
| 19 | Q | E | 1.2 | 0.2 | 198 |
| 19 | Q | N | 1.6 | 0.6 | 78 |
| 20 | D | C | 1.8 | 0.0 | 48 |
| 20 | D | F | 1.9 | 0.2 | 32 |
| 20 | D | M | 1.6 | 0.5 | 96 |
| 20 | D | W | 1.5 | 0.1 | 129 |
| 21 | S | A | 1.6 | 1.0 | 99 |
| 21 | S | C | 1.0 | 0.6 | 227 |
| 21 | S | G | 1.2 | 0.7 | 182 |
| 21 | S | L | 1.0 | 0.2 | 221 |
| 21 | S | V | 1.2 | 0.6 | 196 |
| 23 | G | D | 1.5 | 0.2 | 118 |
| 27 | G | A | 2.0 | 0.5 | 25 |
| 27 | G | D | 1.7 | 0.4 | 50 |
| 27 | G | E | 1.5 | 0.2 | 106 |
| 27 | G | P | 1.6 | 0.1 | 95 |
| 27 | G | R | 1.6 | 0.4 | 90 |
| 27 | G | S | 2.2 | 0.2 | 19 |
| 27 | G | T | 2.0 | 0.3 | 26 |
| 27 | G | Y | 1.6 | 0.1 | 87 |
| 28 | D | C | 1.8 | 0.6 | 38 |
| 28 | D | E | 1.6 | 0.2 | 81 |
| 28 | D | F | 1.4 | 0.1 | 136 |
| 28 | D | G | 1.5 | 0.2 | 108 |
| 30 | W | L | 1.7 | 0.0 | 63 |
| 30 | W | Q | 1.0 | 0.1 | 225 |
| 30 | W | S | 0.7 | 0.1 | 261 |
| 30 | W | V | 1.7 | 0.2 | 56 |
| 32 | E | V | 1.1 | 0.2 | 202 |
| 34 | Q | A | 1.2 | 0.2 | 178 |
| 34 | Q | W | 1.5 | 0.4 | 105 |
| 38 | L | I | 2.0 | 0.0 | 30 |
| 38 | L | M | 1.7 | 0.3 | 64 |
| 38 | L | R | 1.7 | 0.3 | 61 |
| 38 | L | T | 1.9 | 0.3 | 36 |
| 38 | L | V | 1.6 | 0.1 | 100 |
| 40 | I | M | 1.4 | 0.2 | 149 |
| 40 | I | S | 1.5 | 0.1 | 121 |
| 40 | I | V | 1.3 | 0.1 | 169 |
| 42 | D | A | 2.0 | 0.5 | 23 |
| 42 | D | G | 1.5 | 0.2 | 123 |
| 42 | D | H | 0.9 | 0.0 | 237 |
| 42 | D | K | 1.6 | 0.1 | 73 |
| 42 | D | M | 2.4 | 0.4 | 10 |
| 42 | D | R | 1.0 | 0.3 | 219 |
| 42 | D | S | 2.0 | 0.5 | 29 |
| 42 | D | T | 1.8 | 0.0 | 45 |
| 43 | T | C | 1.7 | 0.3 | 58 |
| 43 | T | D | 1.6 | 0.0 | 98 |
| 43 | T | E | 1.3 | 0.0 | 157 |
| 43 | T | G | 1.3 | 0.3 | 164 |
| 43 | T | M | 1.3 | 0.1 | 163 |
| 43 | T | Q | 1.7 | 0.3 | 72 |
| 43 | T | R | 1.5 | 0.1 | 114 |
| 43 | T | Y | 1.2 | 0.2 | 192 |
| 46 | K | G | 1.2 | 0.1 | 174 |
| 46 | K | N | 1.4 | 0.1 | 145 |
| 46 | K | R | 1.7 | 0.5 | 52 |
| 47 | L | C | 1.1 | 0.2 | 208 |
| 47 | L | E | 1.3 | 0.2 | 172 |
| 47 | L | K | 1.1 | 0.1 | 218 |
| 47 | L | N | 0.9 | 0.2 | 246 |
| 47 | L | R | 0.8 | 0.1 | 259 |
| 47 | L | S | 1.2 | 0.0 | 189 |
| 50 | A | I | 0.9 | 0.0 | 240 |
| 50 | A | K | 1.9 | 0.0 | 35 |
| 50 | A | L | 1.0 | 0.0 | 223 |
| 50 | A | R | 1.4 | 0.2 | 134 |
| 50 | A | S | 1.4 | 0.1 | 131 |
| 50 | A | T | 1.4 | 0.1 | 132 |
| 50 | A | V | 1.3 | 0.2 | 152 |
| 52 | G | E | 3.1 | 1.2 | 1 |
| 52 | G | L | 1.7 | 0.7 | 65 |
| 52 | G | N | 1.6 | 0.3 | 83 |
| 52 | G | Q | 1.7 | 0.0 | 59 |
| 54 | E | G | 1.6 | 0.5 | 79 |
| 55 | T | L | 1.5 | 0.1 | 124 |
| 57 | I | A | 1.4 | 0.4 | 140 |
| 57 | I | V | 1.1 | 0.1 | 199 |
| 61 | N | A | 2.9 | 0.9 | 3 |
| 61 | N | G | 2.3 | 1.3 | 15 |
| 61 | N | L | 1.7 | 0.7 | 71 |
| 61 | N | S | 2.5 | 0.2 | 7 |
| 63 | P | V | 1.8 | 0.6 | 42 |
| 64 | A | G | 2.6 | 0.2 | 6 |
| 64 | A | H | 1.7 | NA | 67 |
| 64 | A | S | 2.1 | 0.4 | 20 |
| 67 | A | E | 0.9 | 0.0 | 239 |
| 67 | A | G | 0.8 | 0.0 | 257 |
| 67 | A | S | 1.7 | 0.1 | 54 |
| 68 | I | Q | 1.6 | 0.0 | 77 |
| 69 | P | G | 1.6 | 0.2 | 91 |
| 69 | P | R | 1.1 | 0.0 | 204 |
| 69 | P | S | 1.2 | 0.1 | 191 |
| 69 | P | V | 1.2 | 0.0 | 188 |
| 70 | D | H | 1.4 | 0.0 | 142 |
| 72 | R | K | 1.6 | 0.1 | 103 |
| 72 | R | V | 1.6 | 0.3 | 85 |
| 73 | K | E | 1.5 | 0.6 | 128 |
| 73 | K | Q | 1.8 | 0.6 | 39 |
| 73 | K | R | 1.4 | 0.1 | 133 |
| 75 | I | R | 1.6 | 0.0 | 101 |
| 76 | E | G | 1.3 | 0.3 | 156 |
| 77 | I | C | 1.0 | 0.4 | 233 |
| 77 | I | L | 0.9 | 0.1 | 249 |
| 77 | I | M | 1.3 | 0.1 | 171 |
| 77 | I | R | 1.4 | 0.4 | 146 |
| 77 | I | S | 1.5 | 0.5 | 113 |
| 77 | I | V | 1.2 | 0.2 | 194 |
| 79 | R | K | 0.7 | NA | 265 |
| 79 | R | Q | 1.2 | 0.0 | 177 |
| 81 | A | S | 1.4 | 0.0 | 135 |
| 84 | V | C | 1.2 | 0.2 | 175 |
| 84 | V | F | 1.6 | 0.1 | 89 |
| 84 | V | M | 1.6 | 0.0 | 74 |
| 88 | E | K | 1.3 | 0.2 | 170 |
| 89 | C | I | 1.5 | 0.2 | 126 |
| 89 | C | V | 1.5 | 0.1 | 116 |
| 91 | K | R | 1.2 | 0.0 | 184 |
| 93 | P | A | 1.1 | 0.2 | 203 |
| 93 | P | K | 0.7 | NA | 260 |
| 93 | P | R | 1.4 | 0.7 | 148 |
| 94 | D | C | 1.1 | 0.1 | 207 |
| 94 | D | G | 1.1 | 0.1 | 213 |
| 94 | D | N | 1.0 | 0.2 | 231 |
| 94 | D | Q | 1.2 | 0.0 | 197 |
| 94 | D | S | 1.2 | 0.0 | 185 |
| 97 | L | K | 1.2 | 0.1 | 186 |
| 97 | L | R | 1.3 | 0.1 | 153 |
| 100 | A | G | 1.3 | 0.0 | 154 |
| 100 | A | S | 1.5 | 0.0 | 127 |
| 101 | A | G | 1.6 | 0.0 | 75 |
| 102 | L | V | 1.4 | 0.2 | 143 |
| 104 | L | M | 1.9 | 0.9 | 31 |
| 107 | P | V | 1.8 | 0.5 | 47 |
| 108 | D | E | 1.7 | 0.1 | 60 |
| 109 | A | G | 1.3 | 0.2 | 155 |
| 109 | A | M | 1.5 | 0.3 | 104 |
| 109 | A | V | 1.5 | 0.1 | 125 |
| 111 | T | A | 1.4 | 0.6 | 147 |
| 111 | T | C | 1.6 | 0.6 | 88 |
| 111 | T | G | 1.5 | 0.4 | 120 |
| 111 | T | S | 1.7 | 0.4 | 55 |
| 111 | T | V | 1.5 | 0.5 | 112 |
| 112 | E | G | 1.4 | 0.6 | 138 |
| 112 | E | R | 1.5 | 0.6 | 110 |
| 112 | E | S | 1.5 | 0.3 | 115 |
| 117 | C | A | 1.7 | 0.7 | 51 |
| 117 | C | T | 1.8 | 1.0 | 43 |
| 119 | N | A | 1.4 | 0.3 | 139 |
| 119 | N | C | 1.3 | 0.5 | 167 |
| 119 | N | R | 1.5 | 0.5 | 111 |
| 119 | N | S | 1.3 | 0.5 | 168 |
| 120 | D | T | 1.7 | 0.8 | 66 |
| 123 | F | L | 1.3 | 0.3 | 160 |
| 127 | L | M | 2.4 | 1.0 | 8 |
| 133 | Q | V | 1.6 | 0.7 | 76 |
| 134 | E | G | 0.8 | NA | 258 |
| 137 | G | A | 1.2 | 0.4 | 173 |
| 137 | G | E | 1.2 | 0.3 | 180 |
| 138 | Q | G | 1.1 | NA | 200 |
| 138 | Q | L | 0.9 | NA | 243 |
| 139 | T | E | 0.7 | NA | 264 |
| 147 | Q | I | 1.1 | NA | 211 |
| 150 | P | G | 0.9 | NA | 238 |
| 153 | G | K | 1.6 | 0.4 | 93 |
| 167 | R | E | 1.6 | 0.3 | 92 |
| 174 | S | A | 1.2 | 0.1 | 179 |
| 178 | D | E | 1.2 | 0.2 | 193 |
| 181 | P | E | 0.9 | 0.0 | 242 |
| 195 | A | G | 1.2 | 0.2 | 176 |
| 212 | R | G | 1.6 | 0.1 | 97 |
| 212 | R | Q | 1.7 | 0.0 | 53 |
| 214 | N | Q | 1.8 | 0.1 | 41 |
| 215 | I | V | 0.8 | 0.0 | 252 |
| 220 | M | L | 1.7 | 0.1 | 69 |
| 228 | M | L | 1.4 | 0.1 | 141 |
| 229 | W | Y | 1.7 | 0.1 | 68 |
| 231 | I | M | 0.8 | 0.2 | 254 |
| 234 | R | H | 0.9 | 0.0 | 247 |
| 234 | R | K | 1.0 | 0.0 | 235 |
| 235 | V | I | 1.8 | 0.0 | 44 |
| 236 | A | G | 1.6 | 0.3 | 94 |
| 236 | A | Q | 1.2 | 0.2 | 190 |
| 236 | A | W | 1.4 | 0.1 | 137 |
| 237 | W | L | 1.1 | 0.3 | 209 |
| 238 | V | G | 2.0 | 0.2 | 27 |
| 238 | V | P | 1.3 | 0.1 | 166 |
| 239 | K | A | 1.7 | 0.1 | 62 |
| 239 | K | D | 1.3 | 0.0 | 162 |
| 239 | K | E | 1.5 | 0.1 | 107 |
| 239 | K | G | 1.6 | 0.1 | 80 |
| 239 | K | H | 1.8 | 0.1 | 46 |
| 240 | L | A | 2.3 | 0.5 | 12 |
| 240 | L | D | 2.2 | 0.2 | 18 |
| 240 | L | E | 2.1 | 0.1 | 22 |
| 240 | L | G | 1.5 | 0.0 | 122 |
| 240 | L | V | 1.6 | 0.1 | 86 |
| 243 | R | A | 1.8 | 0.4 | 37 |
| 243 | R | D | 1.6 | 0.1 | 102 |
| 243 | R | K | 1.5 | 0.0 | 119 |
| 243 | R | S | 1.4 | 0.0 | 144 |
| 243 | R | V | 1.4 | 0.0 | 130 |
| 245 | P | A | 1.5 | 0.1 | 109 |
| 248 | R | K | 1.1 | 0.1 | 205 |
| 249 | R | P | 1.1 | 0.0 | 206 |
| 251 | M | G | 0.9 | 0.1 | 251 |
| 251 | M | V | 1.3 | 0.1 | 150 |
| 252 | D | E | 1.0 | 0.1 | 230 |
| 255 | N | A | 1.3 | 0.4 | 159 |
| 255 | N | L | 1.6 | 0.4 | 82 |
| 255 | N | M | 1.2 | 0.1 | 195 |
| 255 | N | Q | 1.1 | 0.0 | 216 |
| 255 | N | R | 1.3 | 0.3 | 161 |
| 255 | N | S | 1.3 | 0.1 | 165 |
| 256 | E | A | 0.9 | 0.1 | 244 |
| 259 | H | W | 1.1 | 0.2 | 217 |
| 260 | I | L | 1.1 | 0.1 | 210 |
| 260 | I | V | 1.0 | 0.1 | 228 |
| 267 | R | C | 1.0 | 0.0 | 226 |
| 272 | I | V | 0.8 | 0.0 | 253 |
| 276 | L | G | 0.8 | 0.1 | 256 |
| 278 | I | L | 1.1 | 0.0 | 214 |
| 286 | S | A | 0.9 | 0.1 | 241 |
| 298 | S | A | 2.1 | 0.1 | 21 |
| 298 | S | T | 2.3 | 0.5 | 14 |
| 299 | D | A | 2.0 | 0.4 | 28 |
| 302 | N | A | 1.9 | 0.2 | 33 |
| 303 | A | C | 2.0 | 0.9 | 24 |
| 303 | A | D | 1.5 | 0.4 | 117 |
| 303 | A | E | 2.3 | 0.8 | 16 |
| 303 | A | S | 2.6 | 1.0 | 5 |
| 304 | T | A | 0.7 | NA | 262 |
| 305 | S | A | 1.0 | NA | 222 |
| 305 | S | G | 0.7 | NA | 263 |
| 307 | A | S | 0.9 | NA | 250 |
| 312 | V | L | 1.9 | 0.8 | 34 |
| 320 | R | L | 1.1 | 0.3 | 215 |
| 321 | R | N | 1.7 | 0.1 | 70 |
| 327 | G | L | 2.4 | 0.3 | 9 |
| 327 | G | Q | 2.8 | 0.2 | 4 |
| 327 | G | V | 2.4 | 0.1 | 11 |
| 328 | A | C | 1.7 | 1.0 | 57 |
| 328 | A | D | 2.3 | 0.4 | 13 |
| 328 | A | R | 3.0 | 2.2 | 2 |
| 328 | A | S | 2.2 | 0.9 | 17 |
| 328 | A | T | 1.6 | 1.2 | 84 |
| 328 | A | V | 1.8 | 0.5 | 40 |

### Example 7

### DNA Shuffling to Create Dicamba Decarboxylase Variants with Improved Enzymatic Activity

[0497] DNA shuffling is a way to rapidly propagate improved variants in a directed evolution experiment to harness the power of selection to evolve protein function. Through multiple cycles or rounds of DNA shuffling, a large number of beneficial sequence variations are recombined to create functionally improved shuffled variants. Each round of shuffling consists of a parent template and diversity selection, library construction, activity assay, and hit selection. Amino acid changes from the best hits from one round are selected for inclusion in the diversity for library construction in the next round. The initial set of sequences or substitutions on a backbone sequence for shuffling are obtained through several avenues including: 1) natural variation in homologs; 2) saturation mutagenesis; 3) random or site directed mutagenesis; 4) rational design through computational modeling based on structure models.

[0498] Using the pre-screened neutral/beneficial amino acid substitutions found from saturation mutagenesis, dicamba decarboxylase DNA shuffling was performed. Shuffled libraries were constructed using techniques including family shuffling, single-gene shuffling, back-crossing, semi-synthetic and synthetic shuffling (Zhang J-H et al. (1997) Proc Natl Acad Sci 94, 4504-4509; Crameri et al. (1998) Nature 391: 288-291; Ness et al. (2002) Nat Biotech 20:1251-1255). Genes coding for shuffled variants of dicamba decarboxylase were cloned into the expression vector specified in Example 2 and introduced into E. coli. The library was plated out on rich agar medium, then individual colonies were picked and grown in magic medium (Invitrogen) in 96-well format at 30° C. overnight. Variants from four 96-well plates were then combined into 384-well assay plates for ¹⁴CO₂ capturing assay as described in Example 1. Variants with higher dicamba decarboxylase activity produce more ¹⁴CO₂ leading to higher intensity spots after exposure, image scanning, and image analysis. Proteins from these cells were then purified for detailed analysis as described in Example 1. Characteristics of k_{cat} and K_{M} were determined as described previously in Example 1. The first round of DNA shuffling incorporated approximately 5 amino acid substitutions from the 30 selected amino acids listed in Table 8 into each progeny variant. Shuffled gene variant libraries were made based on SEQ ID NO:123. Many shuffled variants showed similar or higher dicamba decarboxylase activity compared to the SEQ ID NO:123 (FIG. 9). Shuffled variants with improvement in enzyme characteristics are included in Table 9. Three shuffled variants (SEQ ID NO:125; SEQ ID NO:126; and SEQ ID NO:128) showed greater than 2-fold improvement in k_{cat}/K_{M} as compared with the backbone from this round of shuffling (Table 9). Amino acid substitutions for each improved variant are also displayed in Table 9. Iterative rounds of shuffling continued with the diversity created by mutagenesis and selected by screening.

TABLE 8
30 amino acid changes selected for round one DNA shuffling

| | | | Average | | |
|---|---|---|---|---|---|
| | Amino | | Activity | | |
| Amino | Acid of | | (Fold of | STDEV of | Variant |
| Acid | SEQ ID | Designed | SEQ ID | Average | Ranking by |
| Position | NO: 109 | Alteration | NO: 109) | Activity | Activity |
| 20 | D | F | 1.9 | 0.2 | 32 |
| 27 | G | S | 2.2 | 0.2 | 19 |
| 30 | W | L | 1.7 | 0.0 | 63 |
| 38 | L | I | 2.0 | 0.0 | 30 |
| 42 | D | M | 2.4 | 0.4 | 10 |
| 43 | T | C | 1.7 | 0.3 | 58 |
| 50 | A | K | 1.9 | 0.0 | 35 |
| 52 | G | E | 3.1 | 1.2 | 1 |
| 61 | N | A | 2.9 | 0.9 | 3 |
| 61 | N | S | 2.5 | 0.2 | 7 |
| 64 | A | G | 2.6 | 0.2 | 6 |
| 67 | A | S | 1.7 | 0.1 | 54 |
| 68 | I | Q | 1.6 | 0.0 | 77 |
| 84 | V | F | 1.6 | 0.1 | 89 |
| 101 | A | G | 1.6 | 0.0 | 75 |
| 108 | D | E | 1.7 | 0.1 | 60 |
| 127 | L | M | 2.4 | 1.0 | 8 |
| 212 | R | Q | 1.7 | 0.0 | 53 |
| 214 | N | Q | 1.8 | 0.1 | 41 |
| 229 | W | Y | 1.7 | 0.1 | 68 |
| 235 | V | I | 1.8 | 0.0 | 44 |
| 238 | V | G | 2.0 | 0.2 | 27 |
| 239 | K | H | 1.8 | 0.1 | 46 |
| 240 | L | E | 2.1 | 0.1 | 22 |
| 243 | R | A | 1.8 | 0.4 | 37 |
| 298 | S | A | 2.1 | 0.1 | 21 |
| 302 | N | A | 1.9 | 0.2 | 33 |
| 303 | A | S | 2.6 | 1.0 | 5 |
| 321 | R | N | 1.7 | 0.1 | 70 |
| 327 | G | Q | 2.8 | 0.2 | 4 |
| 328 | A | D | 2.3 | 0.4 | 13 |

TABLE 9
Variants with enzyme kinetic characteristics improved from SEQ ID NO: 1.

| SEQ | | | | | | | | | | | | | |
|---|---|---|---|---|---|---|---|---|---|---|---|---|---|
| ID | Sequence | Amino acid position of SEQ ID NO: 1 | | | | | | | | | | | |
| NO | Description | 20 | 27 | 30 | 61 | 84 | 212 | 214 | 229 | 235 | 238 | 239 | 240 |
| 1 | 2,6- | D | G | W | N | V | R | N | W | N | V | K | L |
| | Dihydroxybenzoate | | | | | | | | | | | | |
| | Decarboxylase | | | | | | | | | | | | |
| 109 | Designed variant of | _{—} | _{—} | _{—} | _{—} | _{—} | _{—} | _{—} | _{—} | V | _{—} | _{—} | _{—} |
| | SEQ ID NO: 1 | | | | | | | | | | | | |
| 123 | N61A of SEQ ID | _{—} | _{—} | _{—} | A | _{—} | _{—} | _{—} | _{—} | V | _{—} | _{—} | _{—} |
| | NO: 109 | | | | | | | | | | | | |
| 124 | Shuffled variant of | _{—} | _{—} | _{—} | A | F | Q | _{—} | _{—} | _{—} | G | _{—} | _{—} |
| | SEQ ID NO: 123 | | | | | | | | | | | | |
| 125 | Shuffled variant of | _{—} | _{—} | _{—} | A | F | _{—} | Q | Y | I | _{—} | H | E |
| | SEQ ID NO: 123 | | | | | | | | | | | | |
| 126 | Shuffled variant of | _{—} | _{—} | _{—} | A | F | _{—} | _{—} | Y | I | _{—} | _{—} | _{—} |
| | SEQ ID NO: 123 | | | | | | | | | | | | |
| 127 | Shuffled variant of | _{—} | S | _{—} | A | _{—} | _{—} | _{—} | _{—} | _{—} | _{—} | _{—} | _{—} |
| | SEQ ID NO: 123 | | | | | | | | | | | | |
| 128 | Shuffled variant of | F | _{—} | _{—} | A | _{—} | _{—} | Q | Y | I | _{—} | _{—} | P |
| | SEQ ID NO: 123 | | | | | | | | | | | | |
| 129 | Shuffled variant of | _{—} | _{—} | L | A | _{—} | _{—} | _{—} | Y | I | _{—} | _{—} | E |
| | SEQ ID NO: 123 | | | | | | | | | | | | |

| SEQ | | | | | | Kinetic characteristics | | |
|---|---|---|---|---|---|---|---|---|
| ID | Amino acid position of SEQ ID NO: 1 | | | | | K_{M} | kcat | kcat/K_{M} |
| NO | 243 | 298 | 302 | 303 | 328 | (mM) | (min⁻¹) | (min⁻¹mM⁻¹) |
| 1 | R | S | N | A | A | 15.000 | 0.020 | 0.001 |
| 109 | _{—} | _{—} | _{—} | _{—} | _{—} | 4.660 | 0.032 | 0.007 |
| 123 | _{—} | _{—} | _{—} | _{—} | _{—} | 4.860 | 0.560 | 0.115 |
| 124 | A | _{—} | _{—} | _{—} | D | 1.990 | 0.190 | 0.096 |
| 125 | _{—} | _{—} | _{—} | _{—} | _{—} | 6.650 | 1.640 | 0.247 |
| 126 | _{—} | A | _{—} | _{—} | _{—} | 8.080 | 2.380 | 0.295 |
| 127 | _{—} | _{—} | _{—} | _{—} | D | 6.740 | 0.920 | 0.136 |
| 128 | _{—} | _{—} | A | S | _{—} | 2.790 | 0.660 | 0.238 |
| 129 | _{—} | A | _{—} | _{—} | _{—} | 15.910 | 3.040 | 0.191 |

### Example 9

### Use of ProSAR-Driven DNA Shuffling to Create Dicamba Decarboxylase Variants with Improved Enzymatic Activity

[0499] The contributions of individual amino acid substitutions toward the activity of dicamba decarboxylastion depend on the backbone sequence. Through the process of DNA shuffling, the backbone is changed each round. For positions that are strong determinants of a particular property, substitutions in those positions may have an effect in multiple sequence contexts. For positions that are weak determinants, however, the expected effect of substitution may change from one protein sequence context to the next. The statistical learning tool ProSAR (Protein Sequence Activity Relationship) developed by Fox R et al (2003, Protein Engineering 16, 589-597) was chosen to facilitate the design of shuffling libraries. The creation of ProSAR models that can be used to infer the contributions of mutational effects on protein function provides the basis for ProSAR-driven DNA shuffling. In principal, this iterative process of DNA shuffling is done by statistical analysis through linear regression on training sets derived from one or more combinatorial libraries per round. At the end of each round, the best variant is selected to serve as the backbone for the next round. Amino acid substitutions are selected as variation for the next round based on the prediction of ProSAR analysis on the current backbone protein sequence. Within a given training set consisting of one or more combinatorial libraries, statistical learning is achieved by formulating an equation that correlates mutations with protein function in the following manner: y=c₁ₐx₁ₐ+c_{1b}x_{1b}+c₂ₐx₂ₐ+c_{2b}x_{2b}+ . . . +cⱼₐxⱼₐ+c_{jb}x_{jb} . . . where y is the predicted function (activity) of the protein sequence, cⱼₐ is the regression coefficient corresponding to the mutational effect of having residue choice a present at variable position j, and xⱼₐ is a variable indicating the presence (xⱼₐ=1) or absence (xⱼₐ=0) of residue a at position j (Fox et al., 2007. Nature Biotechnology 25(3): 338-344). In general, it is assumed that the mutational effects are mostly additive and that only linear terms corresponding to each mutation's independent effect on function appear in equation. When needed, nonlinear terms can be added to capture putatively important interactions between mutations.

### Example 10

### Transformation of Arabidopsis with Dicamba Decarboxylase Genes and Evaluation of Herbicide Response

[0500] Arabidopsis (Arabidopsis thaliana) expressing dicamba decarboxylase genes were produced using the floral dip method of Agrobacterium mediated transformation (Clough S J and Bent A F, 1998, Plant 16:735-43; Chung M. H., Chen M. K., Pan S. M. 2000. Transgenic Res. 9: 471-476; Weigel D. and Glazebrook J. 2006. In Planta Transformation of Arabidopsis. Cold Spring Harb. Protoc. 4668 3). Briefly, Arabidopsis (Col-O) plants were grown in soil in pots. The first inflorescence shoots were removed as soon as they emerged. Plants were ready for transformation when the secondary inflorescence shoots were about 3 inches tall. Agrobacterium carrying a suitable binary vector were cultured in 5 ml LB medium at 28° C. with shaking at 200 rpm for two days. 1 ml of the culture was then inoculated into 200 ml fresh LB media and incubated again with vigorous agitation for an additional 20-24 hours at 28° C. The Agrobacterium culture was then subjected to centrifugation at 6000 rpm in a GSA rotor (or equivalent) for 10 minutes. The pellet was resuspended in 20-100 ml of spraying medium containing 5% sucrose and 0.01-0.2% (v/v) Silwet L-77. The Agrobacterium suspension was transferred into a hand-held sprayer for spraying onto inflorescences of the transformation-ready Arabidopsis plants. The sprayed plants were covered with a humidity dome for 24 hours before the cover was removed for growth under normal growing conditions. Seeds were harvested. Screening of transformants was performed under sterile conditions. Surface sterilized seeds were placed onto MS-Agar plates (Phyto Technology labs Prod. No. M519) containing appropriate selective antibiotics (kanamycin 50 mg/L, hygromycin 20 mg/L, or bialaphos 10 mg/L). Anti-Agrobacteirum antibiotic timentin was also included in the media. Plates were cultured at 21° C. at 16 hr light for 7-14 days. Transgenic events harboring dicamba decarboxylase genes were germinated and transferred to soil pots in the greenhouse for evaluation of herbicide tolerance.

[0501] A selectable marker gene used to facilitate Arabidopsis transformation is a chimeric gene composed of the 35S promoter from Cauliflower Mosaic Virus (Odell et al. 1985. Nature 313:810-812), the bar gene from Streptomyces hygroscopicus (Thompson et al. (1987) EMBO J. 6:2519-2523) and the 3′UBQ14 terminator region from Arabidopsis (Callis et al., 1995. Genetics 139 (2), 921-939). Another visual selectable marker gene used to facilitate Arabidopsis transformation is a chimeric gene composed of the UBQ promoter from soybean (Xing et al., 2010. Plant Biotechnology Journal 8:772-782), the YFP coding sequence, and the 3′ region of the nopaline synthase gene from the T-DNA of the Ti plasmid of Agrobacterium tumefaciens. Bialophos was used as the selection agent during the transformation process. Dicamba decarboxylase genes were expressed with a constitutive promoter, for example, the Arabidopsis UBQ10 promoter (Norris et al., 1993. Plant Mol Biol 21:895-906) or UBQ3 promoter (Norris et al., 1993. Plant Mol Biol 21:895-906) for strong or moderate expression and the 3′ terminator region of the French bean phaseolin gene (Sun et al., 1981. Nature 289:37-41; Slightom et al., 1983. Proc. Natl. Acad. Sci. U.S.A. 80 (7), 1897-1901).

[0502] Seeds of Arabidopsis ecotype Columbia (Col-0) and dicamba decarboxylase transgenic events were surface sterilized with 70% (v/v) ethanol for 5 minutes and 10% (v/v) bleach for 15 minutes. After being washed three times with distilled water, the seeds were incubated at 4° C. for 4 days. The seeds were then germinated on 1× Murashige and Skoog (MS) medium with a pH of 5.7, 3% (w/v) sucrose, and 0.8% (w/v) agar. After incubation for 3.5 days, the seedlings were transferred to basal medium containing B5 vitamin, 3% (w/v) sucrose, 2.5 mm MES (pH 5.7), 1.2% (w/v) agar, and filter sterilized dicamba was added to the media at 60° C. The concentrations of dicamba were 0 μM, 5.0 μM, 7.0 μM, and 10 μM. The basal medium contained 1/10×MS macronutrients (2.05 mm NH₄NO₃, 1.8 mm KNO₃, 0.3 mm CaCl₂, and 0.156 mm MgSO₄) and 1×MS micronutrients (100 μm H₃BO₃, 100 μm MnSO₄, 30 μm ZnSO₄, 5 μm KI, 1 μm Na₂MoO₄, 0.1 μm CuSO₄, 0.1 μm CoCl₂, 0.1 mm FeSO₄, and 0.1 mm Na₂EDTA). The seedlings were placed vertically, and the temperature maintained at 23° C. to allow root growth along the surface of the agar, with a photoperiod of 16 h of light and 8 h of dark.

[0503] After 8 days on media with various concentrations of dicamba, the length of the primary root is measured. In wild type Arabidopsis, root growth inhibition is expected from auxin herbicide treatment. The length of the primary root in wild type plants is reduced with dicamba treatment. The more dicamba, the shorter the primary root. The difference in root growth inhibition between wild type and dicamba decarboxylase transgenic events is compared. Alleviation of root growth inhibition on dicamba is an indication of auxin herbicide detoxification due to dicamba decarboxylase activity.

### Example 11

### Transformation of Soybean with Dicamba Decarboxylase Genes

[0504] Soybean plants expressing dicamba decarboxylase transgenes are produced using the method of particle gun bombardment (Klein et al. (1987) Nature 327:70-73, U.S. Pat. No. 4,945,050) using a DuPont Biolistic PDS 1000/He instrument. Transgenes include coding sequences of active dicamba decarboxylases. A selectable marker gene used to facilitate soybean transformation is a chimeric gene composed of the 35S promoter from Cauliflower Mosaic Virus (Odell et al. (1985) Nature 313:810-812), the hygromycin phosphotransferase gene from plasmid pJR225 (from E. coli; Gritz et al. (1983) Gene 25:179-188) and the 3′ region of the nopaline synthase gene from the T-DNA of the Ti plasmid of Agrobacterium tumefaciens. Another selectable marker used to facilitate soybean transformation is a chimeric gene composed of the S-adenosylmethionine synthase (SAMS) promoter (U.S. Pat. No. 7,741,537) from soybean, a highly resistant allele of ALS (U.S. Pat. Nos. 5,605,011, 5,378,824, 5,141,870, and 5,013,659), and the native soybean ALS terminator region. The selection agent used during the transformation process is either hygromycin or chlorsulfuron depending on the marker gene present. Dicamba decarboxylase genes are expressed with a constitutive promoter, for example, the Arabidopsis UBQ10 promoter (Norris et al. (1993) Plant Mol Biol 21:895-906), and the phaseolin gene terminator (Sun S M et al. (1981) Nature 289:37-41 and Slightom et al. (1983) Proc. Natl. Acad. Sci. U.S.A. 80 (7), 1897-1901). Bombardments are carried out with linear DNA fragments purified away from any bacterial vector DNA. The selectable marker gene cassette is in the same DNA fragment as the dicamba decarboxylase expression cassette. Bombarded soybean embryogenic suspension tissue is cultured for one week in the absence of selection agent, then placed in liquid selection medium for 6 weeks. Putative transgenic suspension tissue is sampled for PCR analysis to determine the presence of the dicamba decarboxylase gene. Putative transgenic suspension culture tissue is maintained in selection medium for 3 weeks to obtain enough tissue for plant regeneration. Suspension tissue is matured for 4 weeks using standard procedures; matured somatic embryos are desiccated for 4-7 days and then placed on germination induction medium for 2-4 weeks. Germinated plantlets are transferred to soil in cell pack trays for 3 weeks for acclimatization. Plantlets are potted to 10-inch pots in the greenhouse for evaluation of herbicide resistance. Transgenic soybean, Arabidopsis and other species of plants could also be produced using Agrobacterium transformation using a variety of ex-plants.

### Example 12

### Herbicide Tolerance Evaluation of Dicamba Decarboxylase Transgenic Soybean Plants

[0505] T0, T1 or homozygous T2 and later plants expressing dicamba decarboxylase transgenes are grown in a controlled environment (for example, 25° C., 70% humidity, 16 hr light) to either V2 or V8 growth stage and then sprayed with commercial dicamba herbicide formulations at a rate up to 450 g/ha. Herbicide applications may be made with added 0.25% nonionic surfactant and 1% ammonium sulfate in a spray volume of 374 L/ha. Individual plants are compared to untreated plants of similar genetic background, evaluated for herbicide response at seven to twenty-one days after treatment and assigned a visual response score from 0 to 100% injury (0=no effect to 100=dead plant). Expression of the dicamba decarboxylase gene varies due to the genomic location in the unique TO plants. Plants that do not express the transgenic dicamba decarboxylase gene are severely injured by dicamba herbicide. Plants expressing introduced dicamba decarboxylase genes may show tolerance to the dicamba herbicide due to activity of the dicamba decarboxylase.

[0506] The article “a” and “an” are used herein to refer to one or more than one (i.e., to at least one) of the grammatical object of the article. By way of example, “an element” means one or more element.

[0507] All publications and patent applications mentioned in the specification are indicative of the level of those skilled in the art to which this invention pertains. All publications and patent applications are herein incorporated by reference to the same extent as if each individual publication or patent application was specifically and individually indicated to be incorporated by reference.

[0508] Although the foregoing invention has been described in some detail by way of illustration and example for purposes of clarity of understanding, it will be obvious that certain changes and modifications may be practiced within the scope of the appended claims.

TABLE 1
Abbreviated version of HRAC Herbicide Classification

| I. | ALS Inhibitors (WSSA Group 2) | | | |
|---|---|---|---|---|
| | A. | Sulfonylureas | | |
| | | 1. | Azimsulfuron | |
| | | 2. | Chlorimuron-ethyl | |
| | | 3. | Metsulfuron-methyl | |
| | | 4. | Nicosulfuron | |
| | | 5. | Rimsulfuron | |
| | | 6. | Sulfometuron-methyl | |
| | | 7. | Thifensulfuron-methyl | |
| | | 8. | Tribenuron-methyl | |
| | | 9. | Amidosulfuron | |
| | | 10. | Bensulfuron-methyl | |
| | | 11. | Chlorsulfuron | |
| | | 12. | Cinosulfuron | |
| | | 13. | Cyclosulfamuron | |
| | | 14. | Ethametsulfuron-methyl | |
| | | 15. | Ethoxysulfuron | |
| | | 16. | Flazasulfuron | |
| | | 17. | Flupyrsulfuron-methyl | |
| | | 18. | Foramsulfuron | |
| | | 19. | Imazosulfuron | |
| | | 20. | Iodosulfuron-methyl | |
| | | 21. | Mesosulfuron-methyl | |
| | | 22. | Oxasulfuron | |
| | | 23. | Primisulfuron-methyl | |
| | | 24. | Prosulfuron | |
| | | 25. | Pyrazosulfuron-ethyl | |
| | | 26. | Sulfosulfuron | |
| | | 27. | Triasulfuron | |
| | | 28. | Trifloxysulfuron | |
| | | 29. | Triflusulfuron-methyl | |
| | | 30. | Tritosulfuron | |
| | | 31. | Halosulfuron-methyl | |
| | | 32. | Flucetosulfuron | |
| | B. | Sulfonylaminocarbonyltriazolinones | | |
| | | 1. | Flucarbazone | |
| | | 2. | Procarbazone | |
| | C. | Triazolopyrimidines | | |
| | | 1. | Cloransulam-methyl | |
| | | 2. | Flumetsulam | |
| | | 3. | Diclosulam | |
| | | 4. | Florasulam | |
| | | 5. | Metosulam | |
| | | 6. | Penoxsulam | |
| | | 7. | Pyroxsulam | |
| | D. | Pyrimidinyloxy(thio)benzoates | | |
| | | 1. | Bispyribac | |
| | | 2. | Pyriftalid | |
| | | 3. | Pyribenzoxim | |
| | | 4. | Pyrithiobac | |
| | | 5. | Pyriminobac-methyl | |
| | E. | Imidazolinones | | |
| | | 1. | Imazapyr | |
| | | 2. | Imazethapyr | |
| | | 3. | Imazaquin | |
| | | 4. | Imazapic | |
| | | 5. | Imazamethabenz-methyl | |
| | | 6. | Imazamox | |
| II. | Other Herbicides--Active Ingredients/ | | | |
| | Additional Modes of Action | | | |
| | A. | Inhibitors of Acetyl CoA carboxylase | | |
| | | (ACCase) (WSSA Group 1) | | |
| | | 1. | Aryloxyphenoxypropionates (‘FOPs’) | |
| | | | a. | Quizalofop-P-ethyl |
| | | | b. | Diclofop-methyl |
| | | | c. | Clodinafop-propargyl |
| | | | d. | Fenoxaprop-P-ethyl |
| | | | e. | Fluazifop-P-butyl |
| | | | f. | Propaquizafop |
| | | | g. | Haloxyfop-P-methyl |
| | | | h. | Cyhalofop-butyl |
| | | | i. | Quizalofop-P-ethyl |
| | | 2. | Cyclohexanediones (‘DIMs’) | |
| | | | a. | Alloxydim |
| | | | b. | Butroxydim |
| | | | c. | Clethodim |
| | | | d. | Cycloxydim |
| | | | e. | Sethoxydim |
| | | | f. | Tepraloxydim |
| | | | g. | Tralkoxydim |
| | B. | Inhibitors of Photosystem II-HRAC | | |
| | | Group C1/WSSA Group 5 | | |
| | | 1. | Triazines | |
| | | | a. | Ametryne |
| | | | b. | Atrazine |
| | | | c. | Cyanazine |
| | | | d. | Desmetryne |
| | | | e. | Dimethametryne |
| | | | f. | Prometon |
| | | | g. | Prometryne |
| | | | h. | Propazine |
| | | | i. | Simazine |
| | | | j. | Simetryne |
| | | | k. | Terbumeton |
| | | | l. | Terbuthylazine |
| | | | m. | Terbutryne |
| | | | n. | Trietazine |
| | | 2. | Triazinones | |
| | | | a. | Hexazinone |
| | | | b. | Metribuzin |
| | | | c. | Metamitron |
| | | 3. | Triazolinone | |
| | | | a. | Amicarbazone |
| | | 4. | Uracils | |
| | | | a. | Bromacil |
| | | | b. | Lenacil |
| | | | c. | Terbacil |
| | | 5. | Pyridazinones | |
| | | | a. | Pyrazon |
| | | 6. | Phenyl carbamates | |
| | | | a. | Desmedipham |
| | | | b. | Phenmedipham |
| | C. | Inhibitors of Photosystem II--HRAC | | |
| | | Group C2/WSSA Group 7 | | |
| | | 1. | Ureas | |
| | | | a. | Fluometuron |
| | | | b. | Linuron |
| | | | c. | Chlorobromuron |
| | | | d. | Chlorotoluron |
| | | | e. | Chloroxuron |
| | | | f. | Dimefuron |
| | | | g. | Diuron |
| | | | h. | Ethidimuron |
| | | | i. | Fenuron |
| | | | j. | Isoproturon |
| | | | k. | Isouron |
| | | | l. | Methabenzthiazuron |
| | | | m. | Metobromuron |
| | | | n. | Metoxuron |
| | | | o. | Monolinuron |
| | | | p. | Neburon |
| | | | q. | Siduron |
| | | | r. | Tebuthiuron |
| | | 2. | Amides | |
| | | | a. | Propanil |
| | | | b. | Pentanochlor |
| | D. | Inhibitors of Photosystem II--HRAC | | |
| | | Group C3/WSSA Group 6 | | |
| | | 1. | Nitriles | |
| | | | a. | Bromofenoxim |
| | | | b. | Bromoxynil |
| | | | c. | Ioxynil |
| | | 2. | Benzothiadiazinone (Bentazon) | |
| | | | a. | Bentazon |
| | | 3. | Phenylpyridazines | |
| | | | a. | Pyridate |
| | | | b. | Pyridafol |
| | E. | Photosystem-I-electron diversion | | |
| | | (Bipyridyliums) (WSSA Group 22) | | |
| | | 1. | Diquat | |
| | | 2. | Paraquat | |
| | F. | Inhibitors of PPO (protoporphyrinogen | | |
| | | oxidase) (WSSA Group 14) | | |
| | | 1. | Diphenylethers | |
| | | | a. | Acifluorfen-Na |
| | | | b. | Bifenox |
| | | | c. | Chlomethoxyfen |
| | | | d. | Fluoroglycofen-ethyl |
| | | | e. | Fomesafen |
| | | | f. | Halosafen |
| | | | g. | Lactofen |
| | | | h. | Oxyfluorfen |
| | | 2. | Phenylpyrazoles | |
| | | | a. | Fluazolate |
| | | | b. | Pyraflufen-ethyl |
| | | 3. | N-phenylphthalimides | |
| | | | a. | Cinidon-ethyl |
| | | | b. | Flumioxazin |
| | | | c. | Flumiclorac-pentyl |
| | | 4. | Thiadiazoles | |
| | | | a. | Fluthiacet-methyl |
| | | | b. | Thidiazimin |
| | | 5. | Oxadiazoles | |
| | | | a. | Oxadiazon |
| | | | b. | Oxadiargyl |
| | | 6. | Triazolinones | |
| | | | a. | Carfentrazone-ethyl |
| | | | b. | Sulfentrazone |
| | | 7. | Oxazolidinediones | |
| | | | a. | Pentoxazone |
| | | 8. | Pyrimidindiones | |
| | | | a. | Benzfendizone |
| | | | b. | Butafenicil |
| | | 9. | Others | |
| | | | a. | Pyrazogyl |
| | | | b. | Profluazol |
| | G. | Bleaching: Inhibition of carotenoid | | |
| | | biosynthesis at the phytoene desaturase step | | |
| | | (PDS) (WSSA Group 12) | | |
| | | 1. | Pyridazinones | |
| | | | a. | Norflurazon |
| | | 2. | Pyridinecarboxamides | |
| | | | a. | Diflufenican |
| | | | b. | Picolinafen |
| | | 3. | Others | |
| | | | a. | Beflubutamid |
| | | | b. | Fluridone |
| | | | c. | Flurochloridone |
| | | | d. | Flurtamone |
| | H. | Bleaching: Inhibition of 4- | | |
| | | hydroxyphenyl-pyruvate-dioxygenase (4-HPPD) | | |
| | | (WSSA Group 28) | | |
| | | 1. | Triketones | |
| | | | a. | Mesotrione |
| | | | b. | Sulcotrione |
| | | | c. | topramezone |
| | | | d. | tembotrione |
| | | 2. | Isoxazoles | |
| | | | a. | Pyrasulfotole |
| | | | b. | Isoxaflutole |
| | | 3. | Pyrazoles | |
| | | | a. | Benzofenap |
| | | | b. | Pyrazoxyfen |
| | | | c. | Pyrazolynate |
| | | 4. | Others | |
| | | | a. | Benzobicyclon |
| | I. | Bleaching: Inhibition of carotenoid | | |
| | | biosynthesis (unknown target) (WSSA Group 11 | | |
| | | and 13) | | |
| | | 1. | Triazoles (WSSA Group 11) | |
| | | | a. | Amitrole |
| | | 2. | Isoxazolidinones (WSSA Group 13) | |
| | | | a. | Clomazone |
| | | 3. | Ureas | |
| | | | a. | Fluometuron |
| | | 3. | Diphenylether | |
| | | | a. | Aclonifen |
| | J. | Inhibition of EPSP Synthase | | |
| | | 1. | Glycines (WSSA Group 9) | |
| | | | a. | Glyphosate |
| | | | b. | Sulfosate |
| | K. | Inhibition of glutamine synthetase | | |
| | | 1. | Phosphinic Acids | |
| | | | a. | Glufosinate-ammonium |
| | | | b. | Bialaphos |
| | L. | Inhibition of DHP (dihydropteroate) | | |
| | | synthase (WSSA Group 18) | | |
| | | 1 | Carbamates | |
| | | | a. | Asulam |
| | M. | Microtubule Assembly Inhibition | | |
| | | (WSSA Group 3) | | |
| | | 1. | Dinitroanilines | |
| | | | a. | Benfluralin |
| | | | b. | Butralin |
| | | | c. | Dinitramine |
| | | | d. | Ethalfluralin |
| | | | e. | Oryzalin |
| | | | f. | Pendimethalin |
| | | | g. | Trifluralin |
| | | 2. | Phosphoroamidates | |
| | | | a. | Amiprophos-methyl |
| | | | b. | Butamiphos |
| | | 3. | Pyridines | |
| | | | a. | Dithiopyr |
| | | | b. | Thiazopyr |
| | | 4. | Benzamides | |
| | | | a. | Pronamide |
| | | | b. | Tebutam |
| | | 5. | Benzenedicarboxylic acids | |
| | | | a. | Chlorthal-dimethyl |
| | N. | Inhibition of mitosis/microtubule | | |
| | | organization WSSA Group 23) | | |
| | | 1. | Carbamates | |
| | | | a. | Chlorpropham |
| | | | b. | Propham |
| | | | c. | Carbetamide |
| | O. | Inhibition of cell division (Inhibition of | | |
| | | very long chain fatty acids as proposed | | |
| | | mechanism; WSSA Group 15) | | |
| | | 1. | Chloroacetamides | |
| | | | a. | Acetochlor |
| | | | b. | Alachlor |
| | | | c. | Butachlor |
| | | | d. | Dimethachlor |
| | | | e. | Dimethanamid |
| | | | f. | Metazachlor |
| | | | g. | Metolachlor |
| | | | h. | Pethoxamid |
| | | | i. | Pretilachlor |
| | | | j. | Propachlor |
| | | | k. | Propisochlor |
| | | | l. | Thenylchlor |
| | | 2. | Acetamides | |
| | | | a. | Diphenamid |
| | | | b. | Napropamide |
| | | | c. | Naproanilide |
| | | 3. | Oxyacetamides | |
| | | | a. | Flufenacet |
| | | | b. | Mefenacet |
| | | 4. | Tetrazolinones | |
| | | | a. | Fentrazamide |
| | | 5. | Others | |
| | | | a. | Anilofos |
| | | | b. | Cafenstrole |
| | | | c. | Indanofan |
| | | | d. | Piperophos |
| | P. | Inhibition of cell wall (cellulose) | | |
| | | synthesis | | |
| | | 1. | Nitriles (WSSA Group 20) | |
| | | | a. | Dichlobenil |
| | | | b. | Chlorthiamid |
| | | 2. | Benzamides (isoxaben (WSSA | |
| | | | Group 21)) | |
| | | | a. | Isoxaben |
| | | 3. | Triazolocarboxamides (flupoxam) | |
| | | | a. | Flupoxam |
| | Q. | Uncoupling (membrane disruption): | | |
| | | (WSSA Group 24) | | |
| | | 1. | Dinitrophenols | |
| | | | a. | DNOC |
| | | | b. | Dinoseb |
| | | | c. | Dinoterb |
| | R. | Inhibition of Lipid Synthesis by other | | |
| | | than ACC inhibition | | |
| | | 1. | Thiocarbamates (WSSA Group 8) | |
| | | | a. | Butylate |
| | | | b. | Cycloate |
| | | | c. | Dimepiperate |
| | | | d. | EPTC |
| | | | e. | Esprocarb |
| | | | f. | Molinate |
| | | | g. | Orbencarb |
| | | | h. | Pebulate |
| | | | i. | Prosulfocarb |
| | | | j. | Benthiocarb |
| | | | k. | Tiocarbazil |
| | | | l. | Triallate |
| | | | m. | Vernolate |
| | | 2. | Phosphorodithioates | |
| | | | a. | Bensulide |
| | | 3. | Benzofurans | |
| | | | a. | Benfuresate |
| | | | b. | Ethofumesate |
| | | 4. | Halogenated alkanoic acids | |
| | | | (WSSA Group 26) | |
| | | | a. | TCA |
| | | | b. | Dalapon |
| | | | c. | Flupropanate |
| | S. | Synthetic auxins (IAA-like) (WSSA | | |
| | | Group 4) | | |
| | | 1. | Phenoxycarboxylic acids | |
| | | | a. | Clomeprop |
| | | | b. | 2,4-D |
| | | | c. | Mecoprop |
| | | 2. | Benzoic acids | |
| | | | a. | Dicamba |
| | | | b. | Chloramben |
| | | | c. | TBA |
| | | 3. | Pyridine carboxylic acids | |
| | | | a. | Clopyralid |
| | | | b. | Fluroxypyr |
| | | | c. | Picloram |
| | | | d. | Tricyclopyr |
| | | 4. | Quinoline carboxylic acids | |
| | | | a. | Quinclorac |
| | | | b. | Quinmerac |
| | | 5. | Others (benazolin-ethyl) | |
| | | | a. | Benazolin-ethyl |
| | | 6. | aminocyclopyrachlor | |
| | T. | Inhibition of Auxin Transport | | |
| | | 1. | Phthalamates; semicarbazones | |
| | | | (WSSA Group 19) | |
| | | | a. | Naptalam |
| | | | b. | Diflufenzopyr-Na |
| | U. | Other Mechanism of Action | | |
| | | 1. | Arylaminopropionic acids | |
| | | | a. | Flamprop-M-methyl/- |
| | | | | isopropyl |
| | | 2. | Pyrazolium | |
| | | | a. | Difenzoquat |
| | | 3. | Organoarsenicals | |
| | | | a. | DSMA |
| | | | b. | MSMA |
| | | 4. | Others | |
| | | | a. | Bromobutide |
| | | | b. | Cinmethylin |
| | | | c. | Cumyluron |
| | | | d. | Dazomet |
| | | | e. | Daimuron-methyl |
| | | | f. | Dimuron |
| | | | g. | Etobenzanid |
| | | | h. | Fosamine |
| | | | i. | Metam |
| | | | j. | Oxaziclomefone |
| | | | k. | Oleic acid |
| | | | l. | Pelargonic acid |
| | | | m. | Pyributicarb |

### Megatable Legends

[0509] Megatable 1. The definitions of the column headings are as follows: “MUT ID,” a unique identifier for each substitutions; “Backbone,” the SEQ ID corresponding to the polypeptide backbone in which the substitution was made; “Position,” amino acid position according to the numbering convention of SEQ ID NO: 109, “Ref. A.A.,” the standard single letter code for the amino acid present in the backbone sequence at the indicated position; “Substitution,” the standard single letter code for the amino acid present in the mutant sequence at the indicated position; and “Fold Activity,” refers to the decarboxylation activity of the mutant protein when compared with that of the unmutated backbone protein (SEQ ID NO: 109). Decarboxylation activity of the respective protein samples is determined by measuring the amount of carbon dioxide released from the enzymatic reaction as described herein above.
Megatable 2. The definitions of the column headings are as follows: “SEQ ID NO:”, a unique identifier for each mutated DNA or amino acid sequence; “Trivial Name”, a trivial but unique name for each DNA or protein sequence; “Backbone,” the SEQ ID corresponding to the polypeptide backbone in which the substitution was made; “Fold Activity,” refers to the decarboxylation activity of the mutant or mutant combination protein when compared with that of the unmutated backbone protein (SEQ ID NO: 126, 380, or 509, as appropriate). Decarboxylation activity of the respective protein samples is determined by measuring the amount of carbon dioxide released from the enzymatic reaction as described herein above.

MEGATABLE 1

| MUT | Back- | Posi- | Ref | Substi- | Fold |
|---|---|---|---|---|---|
| ID NO: | bone | tion | A.A. | tution | Activity |
| 1 | 109 | 3 | Q | G | 1.2 |
| 2 | 109 | 3 | Q | M | 1.1 |
| 3 | 109 | 5 | K | E | 0.9 |
| 4 | 109 | 5 | K | I | 1 |
| 5 | 109 | 5 | K | L | 0.8 |
| 6 | 109 | 5 | K | W | 0.9 |
| 7 | 109 | 7 | A | C | 1.3 |
| 8 | 109 | 12 | F | M | 1.3 |
| 9 | 109 | 12 | F | V | 1.2 |
| 10 | 109 | 12 | F | W | 1.2 |
| 11 | 109 | 13 | A | C | 1 |
| 12 | 109 | 15 | P | A | 0.9 |
| 13 | 109 | 15 | P | D | 1 |
| 14 | 109 | 15 | P | E | 1 |
| 15 | 109 | 15 | P | Q | 1 |
| 16 | 109 | 15 | P | T | 1.1 |
| 17 | 109 | 16 | E | A | 1.8 |
| 18 | 109 | 19 | Q | E | 1.2 |
| 19 | 109 | 19 | Q | N | 1.6 |
| 20 | 109 | 20 | D | C | 1.8 |
| 21 | 109 | 20 | D | F | 1.9 |
| 22 | 109 | 20 | D | M | 1.6 |
| 23 | 109 | 20 | D | W | 1.5 |
| 24 | 109 | 21 | S | A | 1.6 |
| 25 | 109 | 21 | S | C | 1 |
| 26 | 109 | 21 | S | G | 1.2 |
| 27 | 109 | 21 | S | L | 1 |
| 28 | 109 | 21 | S | V | 1.2 |
| 29 | 109 | 23 | G | D | 1.5 |
| 30 | 109 | 27 | G | A | 2 |
| 31 | 109 | 27 | G | D | 1.7 |
| 32 | 109 | 27 | G | E | 1.5 |
| 33 | 109 | 27 | G | P | 1.6 |
| 34 | 109 | 27 | G | R | 1.6 |
| 35 | 109 | 27 | G | S | 2.2 |
| 36 | 109 | 27 | G | T | 2 |
| 37 | 109 | 27 | G | Y | 1.6 |
| 38 | 109 | 28 | D | C | 1.8 |
| 39 | 109 | 28 | D | E | 1.6 |
| 40 | 109 | 28 | D | F | 1.4 |
| 41 | 109 | 28 | D | G | 1.5 |
| 42 | 109 | 30 | W | L | 1.7 |
| 43 | 109 | 30 | W | Q | 1 |
| 44 | 109 | 30 | W | S | 0.7 |
| 45 | 109 | 30 | W | V | 1.7 |
| 46 | 109 | 32 | E | V | 1.1 |
| 47 | 109 | 34 | Q | A | 1.2 |
| 48 | 109 | 34 | Q | W | 1.5 |
| 49 | 109 | 38 | L | I | 2 |
| 50 | 109 | 38 | L | M | 1.7 |
| 51 | 109 | 38 | L | R | 1.7 |
| 52 | 109 | 38 | L | T | 1.9 |
| 53 | 109 | 38 | L | V | 1.6 |
| 54 | 109 | 40 | I | M | 1.4 |
| 55 | 109 | 40 | I | S | 1.5 |
| 56 | 109 | 40 | I | V | 1.3 |
| 57 | 109 | 42 | D | A | 2 |
| 58 | 109 | 42 | D | G | 1.5 |
| 59 | 109 | 42 | D | H | 0.9 |
| 60 | 109 | 42 | D | K | 1.6 |
| 61 | 109 | 42 | D | M | 2.4 |
| 62 | 109 | 42 | D | R | 1 |
| 63 | 109 | 42 | D | S | 2 |
| 64 | 109 | 42 | D | T | 1.8 |
| 65 | 109 | 43 | T | C | 1.7 |
| 66 | 109 | 43 | T | D | 1.6 |
| 67 | 109 | 43 | T | E | 1.3 |
| 68 | 109 | 43 | T | G | 1.3 |
| 69 | 109 | 43 | T | M | 1.3 |
| 70 | 109 | 43 | T | Q | 1.7 |
| 71 | 109 | 43 | T | R | 1.5 |
| 72 | 109 | 43 | T | Y | 1.2 |
| 73 | 109 | 46 | K | G | 1.2 |
| 74 | 109 | 46 | K | N | 1.4 |
| 75 | 109 | 46 | K | R | 1.7 |
| 76 | 109 | 47 | L | C | 1.1 |
| 77 | 109 | 47 | L | E | 1.3 |
| 78 | 109 | 47 | L | K | 1.1 |
| 79 | 109 | 47 | L | N | 0.9 |
| 80 | 109 | 47 | L | R | 0.8 |
| 81 | 109 | 47 | L | S | 1.2 |
| 82 | 109 | 50 | A | I | 0.9 |
| 83 | 109 | 50 | A | K | 1.9 |
| 84 | 109 | 50 | A | L | 1 |
| 85 | 109 | 50 | A | R | 1.4 |
| 86 | 109 | 50 | A | S | 1.4 |
| 87 | 109 | 50 | A | T | 1.4 |
| 88 | 109 | 50 | A | V | 1.3 |
| 89 | 109 | 52 | G | E | 3.1 |
| 90 | 109 | 52 | G | L | 1.7 |
| 91 | 109 | 52 | G | N | 1.6 |
| 92 | 109 | 52 | G | Q | 1.7 |
| 93 | 109 | 54 | E | G | 1.6 |
| 94 | 109 | 55 | T | L | 1.5 |
| 95 | 109 | 57 | I | A | 1.4 |
| 96 | 109 | 57 | I | V | 1.1 |
| 97 | 109 | 61 | N | A | 2.9 |
| 98 | 109 | 61 | N | G | 2.3 |
| 99 | 109 | 61 | N | L | 1.7 |
| 100 | 109 | 61 | N | S | 2.5 |
| 101 | 109 | 63 | P | V | 1.8 |
| 102 | 109 | 64 | A | G | 2.6 |
| 103 | 109 | 64 | A | H | 1.7 |
| 104 | 109 | 64 | A | S | 2.1 |
| 105 | 109 | 67 | A | E | 0.9 |
| 106 | 109 | 67 | A | G | 0.8 |
| 107 | 109 | 67 | A | S | 1.7 |
| 108 | 109 | 68 | I | Q | 1.6 |
| 109 | 109 | 69 | P | G | 1.6 |
| 110 | 109 | 69 | P | R | 1.1 |
| 111 | 109 | 69 | P | S | 1.2 |
| 112 | 109 | 69 | P | V | 1.2 |
| 113 | 109 | 70 | D | H | 1.4 |
| 114 | 109 | 72 | R | K | 1.6 |
| 115 | 109 | 72 | R | V | 1.6 |
| 116 | 109 | 73 | K | E | 1.5 |
| 117 | 109 | 73 | K | Q | 1.8 |
| 118 | 109 | 73 | K | R | 1.4 |
| 119 | 109 | 75 | I | R | 1.6 |
| 120 | 109 | 76 | E | G | 1.3 |
| 121 | 109 | 77 | I | C | 1 |
| 122 | 109 | 77 | I | L | 0.9 |
| 123 | 109 | 77 | I | M | 1.3 |
| 124 | 109 | 77 | I | R | 1.4 |
| 125 | 109 | 77 | I | S | 1.5 |
| 126 | 109 | 77 | I | V | 1.2 |
| 127 | 109 | 79 | R | K | 0.7 |
| 128 | 109 | 79 | R | Q | 1.2 |
| 129 | 109 | 81 | A | S | 1.4 |
| 130 | 109 | 84 | V | C | 1.2 |
| 131 | 109 | 84 | V | F | 1.6 |
| 132 | 109 | 84 | V | M | 1.6 |
| 133 | 109 | 88 | E | K | 1.3 |
| 134 | 109 | 89 | C | I | 1.5 |
| 135 | 109 | 89 | C | V | 1.5 |
| 136 | 109 | 91 | K | R | 1.2 |
| 137 | 109 | 93 | P | A | 1.1 |
| 138 | 109 | 93 | P | K | 0.7 |
| 139 | 109 | 93 | P | R | 1.4 |
| 140 | 109 | 94 | D | C | 1.1 |
| 141 | 109 | 94 | D | G | 1.1 |
| 142 | 109 | 94 | D | N | 1 |
| 143 | 109 | 94 | D | Q | 1.2 |
| 144 | 109 | 94 | D | S | 1.2 |
| 145 | 109 | 97 | L | K | 1.2 |
| 146 | 109 | 97 | L | R | 1.3 |
| 147 | 109 | 100 | A | G | 1.3 |
| 148 | 109 | 100 | A | S | 1.5 |
| 149 | 109 | 101 | A | G | 1.6 |
| 150 | 109 | 102 | L | V | 1.4 |
| 151 | 109 | 104 | L | M | 1.9 |
| 152 | 109 | 107 | P | V | 1.8 |
| 153 | 109 | 108 | D | E | 1.7 |
| 154 | 109 | 109 | A | G | 1.3 |
| 155 | 109 | 109 | A | M | 1.5 |
| 156 | 109 | 109 | A | V | 1.5 |
| 157 | 109 | 111 | T | A | 1.4 |
| 158 | 109 | 111 | T | C | 1.6 |
| 159 | 109 | 111 | T | G | 1.5 |
| 160 | 109 | 111 | T | S | 1.7 |
| 161 | 109 | 111 | T | V | 1.5 |
| 162 | 109 | 112 | E | G | 1.4 |
| 163 | 109 | 112 | E | R | 1.5 |
| 164 | 109 | 112 | E | S | 1.5 |
| 165 | 109 | 117 | C | A | 1.7 |
| 166 | 109 | 117 | C | T | 1.8 |
| 167 | 109 | 119 | N | A | 1.4 |
| 168 | 109 | 119 | N | C | 1.3 |
| 169 | 109 | 119 | N | R | 1.5 |
| 170 | 109 | 119 | N | S | 1.3 |
| 171 | 109 | 120 | D | T | 1.7 |
| 172 | 109 | 123 | F | L | 1.3 |
| 173 | 109 | 127 | L | M | 2.4 |
| 174 | 109 | 133 | Q | V | 1.6 |
| 175 | 109 | 134 | E | G | 0.8 |
| 176 | 109 | 137 | G | A | 1.2 |
| 177 | 109 | 137 | G | E | 1.2 |
| 178 | 109 | 138 | Q | G | 1.1 |
| 179 | 109 | 138 | Q | L | 0.9 |
| 180 | 109 | 139 | T | E | 0.7 |
| 181 | 109 | 147 | Q | I | 1.1 |
| 182 | 109 | 150 | P | G | 0.9 |
| 183 | 109 | 153 | G | K | 1.6 |
| 184 | 109 | 167 | R | E | 1.6 |
| 185 | 109 | 174 | S | A | 1.2 |
| 186 | 109 | 178 | D | E | 1.2 |
| 187 | 109 | 181 | P | E | 0.9 |
| 188 | 109 | 195 | A | G | 1.2 |
| 189 | 109 | 212 | R | G | 1.6 |
| 190 | 109 | 212 | R | Q | 1.7 |
| 191 | 109 | 214 | N | Q | 1.8 |
| 192 | 109 | 215 | I | V | 0.8 |
| 193 | 109 | 220 | M | L | 1.7 |
| 194 | 109 | 228 | M | L | 1.4 |
| 195 | 109 | 229 | W | Y | 1.7 |
| 196 | 109 | 231 | I | M | 0.8 |
| 197 | 109 | 234 | R | H | 0.9 |
| 198 | 109 | 234 | R | K | 1 |
| 199 | 109 | 235 | V | I | 1.8 |
| 200 | 109 | 236 | A | G | 1.6 |
| 201 | 109 | 236 | A | Q | 1.2 |
| 202 | 109 | 236 | A | W | 1.4 |
| 203 | 109 | 237 | W | L | 1.1 |
| 204 | 109 | 238 | V | G | 2 |
| 205 | 109 | 238 | V | P | 1.3 |
| 206 | 109 | 239 | K | A | 1.7 |
| 207 | 109 | 239 | K | D | 1.3 |
| 208 | 109 | 239 | K | E | 1.5 |
| 209 | 109 | 239 | K | G | 1.6 |
| 210 | 109 | 239 | K | H | 1.8 |
| 211 | 109 | 240 | L | A | 2.3 |
| 212 | 109 | 240 | L | D | 2.2 |
| 213 | 109 | 240 | L | E | 2.1 |
| 214 | 109 | 240 | L | G | 1.5 |
| 215 | 109 | 240 | L | V | 1.6 |
| 216 | 109 | 243 | R | A | 1.8 |
| 217 | 109 | 243 | R | D | 1.6 |
| 218 | 109 | 243 | R | K | 1.5 |
| 219 | 109 | 243 | R | S | 1.4 |
| 220 | 109 | 243 | R | V | 1.4 |
| 221 | 109 | 245 | P | A | 1.5 |
| 222 | 109 | 248 | R | K | 1.1 |
| 223 | 109 | 249 | R | P | 1.1 |
| 224 | 109 | 251 | M | G | 0.9 |
| 225 | 109 | 251 | M | V | 1.3 |
| 226 | 109 | 252 | D | E | 1 |
| 227 | 109 | 255 | N | A | 1.3 |
| 228 | 109 | 255 | N | L | 1.6 |
| 229 | 109 | 255 | N | M | 1.2 |
| 230 | 109 | 255 | N | Q | 1.1 |
| 231 | 109 | 255 | N | R | 1.3 |
| 232 | 109 | 255 | N | S | 1.3 |
| 233 | 109 | 256 | E | A | 0.9 |
| 234 | 109 | 259 | H | W | 1.1 |
| 235 | 109 | 260 | I | L | 1.1 |
| 236 | 109 | 260 | I | V | 1 |
| 237 | 109 | 267 | R | C | 1 |
| 238 | 109 | 272 | I | V | 0.8 |
| 239 | 109 | 276 | L | G | 0.8 |
| 240 | 109 | 278 | I | L | 1.1 |
| 241 | 109 | 286 | S | A | 0.9 |
| 242 | 109 | 298 | S | A | 2.1 |
| 243 | 109 | 298 | S | T | 2.3 |
| 244 | 109 | 299 | D | A | 2 |
| 245 | 109 | 302 | N | A | 1.9 |
| 246 | 109 | 303 | A | C | 2 |
| 247 | 109 | 303 | A | D | 1.5 |
| 248 | 109 | 303 | A | E | 2.3 |
| 249 | 109 | 303 | A | S | 2.6 |
| 250 | 109 | 304 | T | A | 0.7 |
| 251 | 109 | 305 | S | A | 1 |
| 252 | 109 | 305 | S | G | 0.7 |
| 253 | 109 | 307 | A | S | 0.9 |
| 254 | 109 | 312 | V | L | 1.9 |
| 255 | 109 | 320 | R | L | 1.1 |
| 256 | 109 | 321 | R | N | 1.7 |
| 257 | 109 | 327 | G | L | 2.4 |
| 258 | 109 | 327 | G | Q | 2.8 |
| 259 | 109 | 327 | G | V | 2.4 |
| 260 | 109 | 328 | A | C | 1.7 |
| 261 | 109 | 328 | A | D | 2.3 |
| 262 | 109 | 328 | A | R | 3 |
| 263 | 109 | 328 | A | S | 2.2 |
| 264 | 109 | 328 | A | T | 1.6 |
| 265 | 109 | 328 | A | V | 1.8 |
| 266 | 509 | 3 | Q | P | 1.2 |
| 267 | 509 | 75 | I | R | 1.0 |
| 268 | 509 | 85 | L | A | 1.1 |
| 269 | 509 | 92 | R | K | 1.1 |
| 270 | 509 | 105 | Q | G | 1.1 |
| 271 | 509 | 316 | R | S | 1.3 |
| 272 | 509 | 304 | T | V | 1.0 |
| 273 | 509 | 65 | V | C | 1.0 |

MEGATABLE 2

| SEQ | Trivial | Back- | Fold |
|---|---|---|---|
| ID NO: | Name | Bone | Activity |
| 133 | DDEC0201 | Self | 1.0 |
| 134 | S04087550 | 133 | 1.1 |
| 135 | S04087651 | 133 | 1.3 |
| 136 | S04087682 | 133 | 1.4 |
| 137 | S04087724 | 133 | 1.4 |
| 138 | S04087726 | 133 | 1.1 |
| 139 | S04087758 | 133 | 1.1 |
| 140 | S04087816 | 133 | 1.1 |
| 141 | S04087817 | 133 | 0.9 |
| 142 | S04087867 | 133 | 1.4 |
| 143 | S04087869 | 133 | 1.3 |
| 144 | S04087874 | 133 | 1.2 |
| 145 | S04087904 | 133 | 1.1 |
| 146 | S04087906 | 133 | 1.2 |
| 147 | S04087910 | 133 | 0.8 |
| 148 | S04087922 | 133 | 0.8 |
| 149 | S04087951 | 133 | 1.1 |
| 150 | S04087955 | 133 | 1.1 |
| 151 | S04087989 | 133 | 1.0 |
| 152 | S04088002 | 133 | 1.1 |
| 153 | S04088006 | 133 | 1.8 |
| 154 | S04088059 | 133 | 1.3 |
| 155 | S04088062 | 133 | 1.2 |
| 156 | S04088065 | 133 | 1.5 |
| 157 | S04088073 | 133 | 1.2 |
| 158 | S04088096 | 133 | 1.0 |
| 159 | S04088099 | 133 | 1.0 |
| 160 | S04088106 | 133 | 1.1 |
| 161 | S04088161 | 133 | 1.1 |
| 162 | S04088163 | 133 | 1.0 |
| 163 | S04088168 | 133 | 1.3 |
| 164 | S04088173 | 133 | 0.9 |
| 165 | S04088185 | 133 | 1.1 |
| 166 | S04088201 | 133 | 1.0 |
| 167 | S04088213 | 133 | 1.1 |
| 168 | S04088238 | 133 | 1.1 |
| 169 | S04088328 | 133 | 1.0 |
| 170 | S04088406 | 133 | 1.1 |
| 171 | S04088438 | 133 | 1.1 |
| 172 | S04088440 | 133 | 1.1 |
| 173 | S04088448 | 133 | 1.4 |
| 174 | S04088458 | 133 | 1.1 |
| 175 | S04088522 | 133 | 1.3 |
| 176 | S04088555 | 133 | 1.0 |
| 177 | S04088647 | 133 | 1.0 |
| 178 | S04088672 | 133 | 1.2 |
| 179 | S04088678 | 133 | 0.9 |
| 180 | S04088695 | 133 | 1.2 |
| 181 | S04088702 | 133 | 1.0 |
| 182 | S04088703 | 133 | 1.1 |
| 183 | S04088710 | 133 | 1.0 |
| 184 | S04088744 | 133 | 0.8 |
| 185 | S04088787 | 133 | 1.2 |
| 186 | S04088838 | 133 | 1.2 |
| 187 | S04088881 | 133 | 1.1 |
| 188 | S04088909 | 133 | 1.1 |
| 189 | S04088926 | 133 | 0.9 |
| 190 | S04088929 | 133 | 1.0 |
| 191 | S04088935 | 133 | 1.4 |
| 192 | S04088938 | 133 | 1.0 |
| 193 | S04088987 | 133 | 1.9 |
| 194 | S04089008 | 133 | 2.2 |
| 195 | S04089015 | 133 | 3.0 |
| 196 | S04089044 | 133 | 1.1 |
| 197 | S04089049 | 133 | 1.1 |
| 198 | S04089092 | 133 | 2.0 |
| 199 | S04089093 | 133 | 1.2 |
| 200 | S04089106 | 133 | 1.0 |
| 201 | S04089113 | 133 | 1.5 |
| 202 | S04089148 | 133 | 2.2 |
| 203 | S04089157 | 133 | 2.3 |
| 204 | S04089193 | 133 | 1.0 |
| 205 | S04089275 | 133 | 1.0 |
| 206 | S04089289 | 133 | 1.3 |
| 207 | S04089300 | 133 | 1.4 |
| 208 | S04089344 | 133 | 2.2 |
| 209 | S04089354 | 133 | 1.3 |
| 210 | S04089375 | 133 | 1.3 |
| 211 | S04089378 | 133 | 1.2 |
| 212 | S04089379 | 133 | 1.3 |
| 213 | S04089387 | 133 | 1.5 |
| 214 | S04089392 | 133 | 1.5 |
| 215 | S04089394 | 133 | 1.1 |
| 216 | S04089406 | 133 | 2.1 |
| 217 | S04089407 | 133 | 1.8 |
| 218 | S04089411 | 133 | 2.1 |
| 219 | S04089429 | 133 | 1.4 |
| 220 | S04089431 | 133 | 2.1 |
| 221 | S04089436 | 133 | 1.1 |
| 222 | S04089449 | 133 | 1.1 |
| 223 | S04089460 | 133 | 1.7 |
| 224 | S04089461 | 133 | 1.6 |
| 225 | S04089466 | 133 | 0.9 |
| 226 | S04089471 | 133 | 1.0 |
| 227 | S04089493 | 133 | 2.1 |
| 228 | S04089512 | 133 | 1.6 |
| 229 | S04089536 | 133 | 1.0 |
| 230 | S04089558 | 133 | 1.2 |
| 231 | S04089560 | 133 | 0.9 |
| 232 | S04089564 | 133 | 1.3 |
| 233 | S04089565 | 133 | 1.0 |
| 234 | S04089576 | 133 | 0.9 |
| 235 | S04089589 | 133 | 1.5 |
| 236 | S04089597 | 133 | 0.9 |
| 237 | S04089598 | 133 | 1.0 |
| 238 | S04089614 | 133 | 0.8 |
| 239 | S04089621 | 133 | 1.2 |
| 240 | S04089627 | 133 | 0.9 |
| 241 | S04089630 | 133 | 0.9 |
| 242 | S04089654 | 133 | 1.0 |
| 243 | S04089656 | 133 | 1.6 |
| 244 | S04089681 | 133 | 1.0 |
| 245 | S04089686 | 133 | 1.0 |
| 246 | S04089707 | 133 | 0.8 |
| 247 | S04089714 | 133 | 1.0 |
| 248 | S04089716 | 133 | 1.5 |
| 249 | S04089729 | 133 | 0.9 |
| 250 | S04089733 | 133 | 0.8 |
| 251 | S04089736 | 133 | 1.2 |
| 252 | S04089737 | 133 | 0.9 |
| 253 | S04089738 | 133 | 1.7 |
| 254 | S04089739 | 133 | 1.2 |
| 255 | S04089752 | 133 | 1.0 |
| 256 | S04089758 | 133 | 1.0 |
| 257 | S04089780 | 133 | 1.6 |
| 258 | S04089781 | 133 | 1.2 |
| 259 | S04089795 | 133 | 1.8 |
| 260 | S04089797 | 133 | 1.5 |
| 261 | S04090008 | 133 | 1.2 |
| 262 | S04090070 | 133 | 1.2 |
| 263 | S04090112 | 133 | 0.9 |
| 264 | S04090217 | 133 | 1.1 |
| 265 | S04090480 | 133 | 1.0 |
| 266 | S04090496 | 133 | 1.3 |
| 267 | S04090497 | 133 | 2.2 |
| 268 | S04090502 | 133 | 1.3 |
| 269 | S04090508 | 133 | 1.1 |
| 270 | S04090509 | 133 | 1.0 |
| 271 | S04090557 | 133 | 1.2 |
| 272 | S04090558 | 133 | 1.0 |
| 273 | S04090566 | 133 | 1.0 |
| 274 | S04090625 | 133 | 1.0 |
| 275 | S04090637 | 133 | 1.0 |
| 276 | S04090649 | 133 | 1.0 |
| 277 | S04090657 | 133 | 0.9 |
| 278 | S04090658 | 133 | 1.2 |
| 279 | S04090659 | 133 | 0.9 |
| 280 | S04090677 | 133 | 1.0 |
| 281 | S04090685 | 133 | 1.2 |
| 282 | S04090702 | 133 | 1.0 |
| 283 | S04090705 | 133 | 1.1 |
| 284 | S04090737 | 133 | 0.9 |
| 285 | S04090748 | 133 | 0.9 |
| 286 | S04090752 | 133 | 0.9 |
| 287 | S04090761 | 133 | 0.9 |
| 288 | S04090777 | 133 | 0.9 |
| 289 | S04090785 | 133 | 1.1 |
| 290 | S04090800 | 133 | 1.0 |
| 291 | S04090803 | 133 | 1.2 |
| 292 | S04090816 | 133 | 1.0 |
| 293 | S04090932 | 133 | 1.1 |
| 294 | S04090952 | 133 | 1.4 |
| 295 | S04091022 | 133 | 1.1 |
| 296 | S04091074 | 133 | 1.0 |
| 297 | S04091079 | 133 | 0.9 |
| 298 | S04091121 | 133 | 1.1 |
| 299 | S04091138 | 133 | 1.4 |
| 300 | S04091140 | 133 | 1.4 |
| 301 | S04091164 | 133 | 1.2 |
| 302 | S04091202 | 133 | 0.9 |
| 303 | S04091206 | 133 | 1.0 |
| 304 | S04091207 | 133 | 1.2 |
| 305 | S04091218 | 133 | 0.9 |
| 306 | S04091219 | 133 | 1.3 |
| 307 | S04091234 | 133 | 0.8 |
| 308 | S04091246 | 133 | 1.0 |
| 309 | S04091278 | 133 | 1.0 |
| 310 | S04091288 | 133 | 1.1 |
| 311 | S04091316 | 133 | 1.1 |
| 312 | S04091320 | 133 | 1.0 |
| 313 | S04091339 | 133 | 0.9 |
| 314 | S04091345 | 133 | 1.0 |
| 315 | S04091373 | 133 | 1.0 |
| 316 | S04091375 | 133 | 1.4 |
| 317 | S04091402 | 133 | 1.1 |
| 318 | S04091404 | 133 | 1.3 |
| 319 | S04091407 | 133 | 1.3 |
| 320 | S04091409 | 133 | 1.8 |
| 321 | S04091411 | 133 | 1.6 |
| 322 | S04091416 | 133 | 1.2 |
| 323 | S04091433 | 133 | 1.3 |
| 324 | S04091442 | 133 | 1.0 |
| 325 | S04091461 | 133 | 1.2 |
| 326 | S04091471 | 133 | 1.3 |
| 327 | S04091490 | 133 | 1.1 |
| 328 | S04091495 | 133 | 1.1 |
| 329 | S04091499 | 133 | 0.9 |
| 330 | S04091501 | 133 | 0.9 |
| 331 | S04091502 | 133 | 0.9 |
| 332 | S04091507 | 133 | 1.1 |
| 333 | S04091519 | 133 | 1.1 |
| 334 | S04091526 | 133 | 1.2 |
| 335 | S04091544 | 133 | 1.2 |
| 336 | S04091546 | 133 | 0.8 |
| 337 | S04091566 | 133 | 1.2 |
| 338 | S04091572 | 133 | 1.1 |
| 339 | S04091587 | 133 | 1.0 |
| 340 | S04091590 | 133 | 1.1 |
| 341 | S04091600 | 133 | 1.0 |
| 342 | S04091609 | 133 | 0.9 |
| 343 | S04091611 | 133 | 1.1 |
| 344 | S04091614 | 133 | 1.1 |
| 345 | S04091618 | 133 | 1.0 |
| 346 | S04091621 | 133 | 1.0 |
| 347 | S04091622 | 133 | 1.7 |
| 348 | S04091639 | 133 | 1.1 |
| 349 | S04091640 | 133 | 0.9 |
| 350 | S04091647 | 133 | 0.9 |
| 351 | S04091650 | 133 | 1.0 |
| 352 | S04091655 | 133 | 0.9 |
| 353 | S04091677 | 133 | 1.7 |
| 354 | S04091687 | 133 | 0.9 |
| 355 | S04091721 | 133 | 1.0 |
| 356 | S04091727 | 133 | 1.0 |
| 357 | S04091733 | 133 | 1.4 |
| 358 | S04091736 | 133 | 0.9 |
| 359 | S04091737 | 133 | 1.3 |
| 360 | S04091750 | 133 | 1.1 |
| 361 | S04091757 | 133 | 1.0 |
| 362 | S04091765 | 133 | 0.9 |
| 363 | S04091776 | 133 | 0.9 |
| 364 | S04091784 | 133 | 1.0 |
| 365 | S04091791 | 133 | 1.6 |
| 366 | S04091795 | 133 | 0.9 |
| 367 | S04091812 | 133 | 0.9 |
| 368 | S04091844 | 133 | 0.9 |
| 369 | S04091847 | 133 | 1.1 |
| 370 | S04091869 | 133 | 0.9 |
| 371 | S04091876 | 133 | 0.9 |
| 372 | S04091882 | 133 | 1.1 |
| 373 | S04091909 | 133 | 1.2 |
| 374 | S04091918 | 133 | 1.3 |
| 375 | S04091929 | 133 | 0.9 |
| 376 | S04091931 | 133 | 1.3 |
| 377 | S04091943 | 133 | 1.0 |
| 378 | S04091946 | 133 | 1.1 |
| 379 | S04091948 | 133 | 1.1 |
| 380 | DDEC0301 | Self | 1.0 |
| 381 | S04248889 | 380 | 1.3 |
| 382 | S04248953 | 380 | 1.3 |
| 383 | S04249228 | 380 | 1.6 |
| 384 | S04249439 | 380 | 1.3 |
| 385 | S04249604 | 380 | 1.3 |
| 386 | S04250094 | 380 | 1.1 |
| 387 | S04250281 | 380 | 0.9 |
| 388 | S04250412 | 380 | 1.2 |
| 389 | S04250467 | 380 | 1.3 |
| 390 | S04250942 | 380 | 1.2 |
| 391 | S04251253 | 380 | 1.5 |
| 392 | S04251277 | 380 | 1.4 |
| 393 | S04251419 | 380 | 1.1 |
| 394 | S04251446 | 380 | 1.2 |
| 395 | S04251900 | 380 | 1.0 |
| 396 | S04251964 | 380 | 1.9 |
| 397 | S04251967 | 380 | 1.8 |
| 398 | S04252089 | 380 | 1.0 |
| 399 | S04252092 | 380 | 1.5 |
| 400 | S04252179 | 380 | 1.6 |
| 401 | S04252265 | 380 | 1.2 |
| 402 | S04252918 | 380 | 1.0 |
| 403 | S04253146 | 380 | 1.6 |
| 404 | S04253214 | 380 | 2.0 |
| 405 | S04253311 | 380 | 1.6 |
| 406 | S04253359 | 380 | 1.4 |
| 407 | S04253596 | 380 | 1.8 |
| 408 | S04253796 | 380 | 0.8 |
| 409 | S04254138 | 380 | 1.5 |
| 410 | S04254247 | 380 | 1.3 |
| 411 | S04254262 | 380 | 1.6 |
| 412 | S04254326 | 380 | 1.2 |
| 413 | S04254781 | 380 | 1.4 |
| 414 | S04254783 | 380 | 1.1 |
| 415 | S04254977 | 380 | 1.1 |
| 416 | S04254985 | 380 | 1.1 |
| 417 | S04257584 | 380 | 1.9 |
| 418 | S04257591 | 380 | 1.8 |
| 419 | S04257645 | 380 | 2.2 |
| 420 | S04257663 | 380 | 1.5 |
| 421 | S04257674 | 380 | 2.4 |
| 422 | S04257682 | 380 | 2.2 |
| 423 | S04257687 | 380 | 2.1 |
| 424 | S04257715 | 380 | 1.8 |
| 425 | S04257721 | 380 | 1.8 |
| 426 | S04257735 | 380 | 1.6 |
| 427 | S04257745 | 380 | 2.4 |
| 428 | S04257771 | 380 | 1.1 |
| 429 | S04257772 | 380 | 1.0 |
| 430 | S04257783 | 380 | 2.1 |
| 431 | S04257791 | 380 | 2.1 |
| 432 | S04257822 | 380 | 2.1 |
| 433 | S04257844 | 380 | 1.9 |
| 434 | S04257916 | 380 | 0.8 |
| 435 | S04257946 | 380 | 1.2 |
| 436 | S04257952 | 380 | 1.8 |
| 437 | S04257961 | 380 | 1.2 |
| 438 | S04257968 | 380 | 1.5 |
| 439 | S04257972 | 380 | 1.9 |
| 440 | S04258020 | 380 | 1.3 |
| 441 | S04258197 | 380 | 1.8 |
| 442 | S04258198 | 380 | 1.1 |
| 443 | S04258282 | 380 | 1.6 |
| 444 | S04258336 | 380 | 2.3 |
| 445 | S04258378 | 380 | 1.5 |
| 446 | S04258401 | 380 | 1.0 |
| 447 | S04258456 | 380 | 1.2 |
| 448 | S04258536 | 380 | 1.8 |
| 449 | S04258558 | 380 | 1.3 |
| 450 | S04258572 | 380 | 0.9 |
| 451 | S04259135 | 380 | 1.4 |
| 452 | S04259209 | 380 | 2.0 |
| 453 | S04270153 | 380 | 1.7 |
| 454 | S04270223 | 380 | 1.8 |
| 455 | S04270322 | 380 | 2.1 |
| 456 | S04270340 | 380 | 1.7 |
| 457 | S04270824 | 380 | 1.7 |
| 458 | S04272119 | 380 | 1.2 |
| 459 | S04272152 | 380 | 1.1 |
| 460 | S04272230 | 380 | 1.9 |
| 461 | S04272235 | 380 | 1.7 |
| 462 | S04272236 | 380 | 1.1 |
| 463 | S04272266 | 380 | 1.6 |
| 464 | S04272282 | 380 | 1.0 |
| 465 | S04272335 | 380 | 1.6 |
| 466 | S04272449 | 380 | 1.8 |
| 467 | S04272458 | 380 | 1.7 |
| 468 | S04272506 | 380 | 2.1 |
| 469 | S04272550 | 380 | 1.8 |
| 470 | S04272603 | 380 | 1.8 |
| 471 | S04272623 | 380 | 1.3 |
| 472 | S04272639 | 380 | 1.4 |
| 473 | S04272708 | 380 | 1.9 |
| 474 | S04272711 | 380 | 1.6 |
| 475 | S04273140 | 380 | 1.2 |
| 476 | S04273437 | 380 | 1.8 |
| 477 | S04276453 | 380 | 2.1 |
| 478 | S04276487 | 380 | 1.9 |
| 479 | S04276519 | 380 | 1.4 |
| 480 | S04276690 | 380 | 1.1 |
| 481 | S04276719 | 380 | 1.1 |
| 482 | S04276738 | 380 | 0.9 |
| 483 | S04276757 | 380 | 1.4 |
| 484 | S04276825 | 380 | 0.9 |
| 485 | S04276881 | 380 | 0.9 |
| 486 | S04276959 | 380 | 0.8 |
| 487 | S04277132 | 380 | 1.1 |
| 488 | S04277140 | 380 | 1.4 |
| 489 | S04277170 | 380 | 1.4 |
| 490 | S04278562 | 380 | 2.2 |
| 491 | S04278670 | 380 | 2.1 |
| 492 | S04278687 | 380 | 2.3 |
| 493 | S04278724 | 380 | 2.2 |
| 494 | S04278750 | 380 | 1.9 |
| 495 | S04278814 | 380 | 2.2 |
| 496 | S04278816 | 380 | 2.2 |
| 497 | S04279302 | 380 | 1.0 |
| 498 | S04279398 | 380 | 1.3 |
| 499 | S04279437 | 380 | 0.9 |
| 500 | S04279453 | 380 | 0.9 |
| 501 | S04279471 | 380 | 1.5 |
| 502 | S04279484 | 380 | 1.0 |
| 503 | S04280774 | 380 | 2.1 |
| 504 | S04280791 | 380 | 2.3 |
| 505 | S04280865 | 380 | 2.0 |
| 506 | S04280944 | 380 | 1.1 |
| 507 | S04280958 | 380 | 1.8 |
| 508 | S04280989 | 380 | 1.0 |
| 509 | DDEC0810 | Self | 1.0 |
| 510 | S04319768 | 509 | 1.0 |
| 511 | S04319801 | 509 | 1.3 |
| 512 | S04319804 | 509 | 1.2 |
| 513 | S04319806 | 509 | 1.2 |
| 514 | S04319891 | 509 | 1.1 |
| 515 | S04319906 | 509 | 1.0 |
| 516 | S04319916 | 509 | 1.1 |
| 517 | S04319947 | 509 | 1.2 |
| 518 | S04319952 | 509 | 1.5 |
| 519 | S04319968 | 509 | 1.1 |
| 520 | S04320007 | 509 | 0.8 |
| 521 | S04320019 | 509 | 1.5 |
| 522 | S04320046 | 509 | 1.1 |
| 523 | S04320063 | 509 | 1.2 |
| 524 | S04320064 | 509 | 1.1 |
| 525 | S04320066 | 509 | 1.0 |
| 526 | S04320091 | 509 | 1.0 |
| 527 | S04320184 | 509 | 1.1 |
| 528 | S04320223 | 509 | 1.3 |
| 529 | S04320224 | 509 | 1.2 |
| 530 | S04320274 | 509 | 1.1 |
| 531 | S04320366 | 509 | 1.3 |
| 532 | S04320431 | 509 | 1.3 |
| 533 | S04320434 | 509 | 0.9 |
| 534 | S04320440 | 509 | 1.1 |
| 535 | S04320519 | 509 | 1.1 |
| 536 | S04320520 | 509 | 1.3 |
| 537 | S04320545 | 509 | 1.3 |
| 538 | S04320597 | 509 | 1.0 |
| 539 | S04320606 | 509 | 0.9 |
| 540 | S04320610 | 509 | 1.0 |
| 541 | S04320629 | 509 | 0.9 |
| 542 | S04320636 | 509 | 1.0 |
| 543 | S04320673 | 509 | 0.9 |
| 544 | S04320735 | 509 | 1.2 |
| 545 | S04320744 | 509 | 1.1 |
| 546 | S04320751 | 509 | 1.3 |
| 547 | S04320771 | 509 | 1.6 |
| 548 | S04320802 | 509 | 0.8 |
| 549 | S04320808 | 509 | 1.1 |
| 550 | S04320859 | 509 | 1.1 |
| 551 | S04320860 | 509 | 1.0 |
| 552 | S04320875 | 509 | 1.7 |
| 553 | S04320879 | 509 | 0.9 |
| 554 | S04320889 | 509 | 0.9 |
| 555 | S04320899 | 509 | 0.8 |
| 556 | S04320957 | 509 | 1.3 |
| 557 | S04321009 | 509 | 1.0 |
| 558 | S04321096 | 509 | 1.0 |
| 559 | S04321111 | 509 | 1.0 |
| 560 | S04321170 | 509 | 0.9 |
| 561 | S04321275 | 509 | 1.1 |
| 562 | S04321300 | 509 | 1.7 |
| 563 | S04321304 | 509 | 0.9 |
| 564 | S04321440 | 509 | 0.9 |
| 565 | S04321451 | 509 | 1.1 |
| 566 | S04321468 | 509 | 0.9 |
| 567 | S04321471 | 509 | 1.1 |
| 568 | S04321475 | 509 | 1.6 |
| 569 | S04321512 | 509 | 1.3 |
| 570 | S04321514 | 509 | 1.3 |
| 571 | S04321522 | 509 | 0.9 |
| 572 | S04321531 | 509 | 1.0 |
| 573 | S04321545 | 509 | 0.8 |
| 574 | S04321555 | 509 | 1.1 |
| 575 | S04321608 | 509 | 1.3 |
| 576 | S04321610 | 509 | 1.2 |
| 577 | S04321613 | 509 | 1.2 |
| 578 | S04321667 | 509 | 0.9 |
| 579 | S04321761 | 509 | 1.0 |
| 580 | S04321771 | 509 | 1.3 |
| 581 | S04321781 | 509 | 1.1 |
| 582 | S04321814 | 509 | 1.4 |
| 583 | S04321817 | 509 | 1.0 |
| 584 | S04321906 | 509 | 0.9 |
| 585 | S04321944 | 509 | 1.8 |
| 586 | S04321952 | 509 | 1.2 |

The application's sequence listing, which the Patent Office published only in electronic form, follows.

SEQUENCE LISTING (1042 sequences)

SEQ ID NO: 1 - protein, 328 aa, Rhizobium sp.
MAQGKVALEEHFAIPETLQDSAGFVPGDYWKELQHRLLDIQDTRLKLMDAHGIETMILSLNAPAVQAIPDRRKAIEIARRANDVLAEECAKRPDRFLAFAALPLQDPDAATEELQRCVNDLGFVGALVNGFSQEGDGQTPLYYDLPQYRPFWGEVEKLDVPFYLHPRNPLPQDSRIYDGHPWLLGPTWAFAQETAVHALRLMASGLFDEHPRLNIILGHMGEGLPYMMWRIDHRNAWVKLPPRYPAKRRFMDYFNENFHITTSGNFRTQTLIDAILEIGADRILFSTDWPFENIDHASDWFNATSIAEADRVKIGRTNARRLFKLDGA

SEQ ID NO: 2 - protein, 345 aa, Serratia sp.
MAKIICLEEHTLDKALVMASMPAALEQAPFLSDWGKTVTDGNLPDRSRPQIEKNDLINIKGADIGRGRLDDMDVAGITMQVLSVGGFPHLISAAEGVDLNRAANDRLADAVNAHPDRFAAFATLPWAQPDSAEKELERAVKELGFKGALLNGRPSTHFLDHPDYDGLLARFNALGVPLYLHPGLPVRSVQQAYYGGFSDEVTARLSMFGWGWHHEAGIHLLRLILSGAFDKYPNLQVISGHWGEMLPFWLQRLDDSLPQAATGLRRTIAQTFKEQVYVTPSGMLTLPHFQFIYALLGAERIIFSVDYPYQTLDGVKAFIQSLPVPEEAKEAIAFRNAERLLGLTS

SEQ ID NO: 3 - protein, 334 aa, Lactobacillus plantarum
MAKLITVEEHFESAAVTAAMRQAVGNAVLPAVSPALRQYMRDNLPSPAIMQDTQHERLAFMAQYGIDMQVLSYGNSSPQNLSPEQAVPLSQLANDELAKAVVAHPDRYAGLAVLPVGDPQAAVAELNRAVTTLGLRGVLLKGNYQNKFFDEPFFLPIFEAAAALDVPVYFHPSFIPQAVTSHYFESNQWSDVVTGILSSAGYGWHMDVGIQVIRMIASGIFDKLPGLKLISGHWGELVPLFLERLDDELTTYTDLQYPFSTYYRHNVYVTPSGILSAPQLQFMLAEMGADHLMYSIDYPYKQPETSGSFLDIADLTDEQRAQIAFGTATTLFKL

SEQ ID NO: 4 - protein, 336 aa, Lactobacillus buchneri
MAKVITLEEHFSSQKLGQKMAEVLPKRPIGNVSPKMQDYMQRSLPPEAELEDVTGSRIQWMDQHQISMQILSYGNQNPQNSDPKFAVELTKLANDELAKAVAKAPDRFRAFASLPVSHPTDAAAELKRGVEELGFKGAMLVRPTSQAHPFFDDPFYLPIFEAAANLNVPVYLHPSFPDSQIIDYYYSNGPWDDKVSGILGTAGYGWHTDVGIQTVRLLLSGVFEKYPNLKLISGHWGEFASFALERMDQVMYPETNLSEPISKIYRDHVYVTPSGILTEPQLKFVKDEVGIEHLLYSIDYPYIKPENSGSFIESSPLTDEEKELFAHGNAEKLLQL

SEQ ID NO: 5 - protein, 346 aa, Staphylococcus aureus
MAQNNMEANQMKSITFEEHYVIEDIQKETMNAISADPKGVPMKVMLEGLEKKTGFTNADELSHHDERIQFMNNQDVQIQVLSYGNGSPSNLVGQKAIELCQKANDQLANYIAQYPNRFVGFATLPINEPEAAAREFERCINDLGFKGALIMGRAQDGFLDQDKYDIIFKTAENLGVPIYLHPAPVNSDIYQSYYKGNYPEVTAATFACFGYGWHIDVGIHAIHLVLSGIFDRYPKLNMIIGHWGEFIPFFLERMDEALFAEHLNHPVSYYFKNNFYITPSGMLTKPQFDLVKKEAGIDRILYAADYPYIEPEKLGVFLDELGLTDEEKEKISYTNGAKLLGLSSNN

SEQ ID NO: 6 - protein, 254 aa, Treponema brennaborense
MAEILSPEESIYYSKLSNDILAEGIKKNPTRFRGFAALPTPDPIQAAMELERCIKLGGFVGAIINGHINGHYLDEIQFDPILEAADALDVPLYIHPAVPPKAIIDTYYKMNDTYAQTVMVSGGWGWHIETGVHVLRLISSGVFDRHPNLKIVIGHLGEGLPFFMHRLNNAIGGNLKKSYSTYLKENIYYTISGFNDPDLFQFVLKKVGENNIMFSSDYPFNFPKREVELFNELNISEEVREKISFKNAERILKI

SEQ ID NO: 7 - protein, 340 aa, Legionella pneumophila
MAIVDFETHFITEACIDYLTQRQEVPKLVPELNGAYTMCFTPDVSLFHTSALMEELLSLNEQRLAIMDQAGVTIQVLSLTTINGIDSCPGDENKSTALAREVNDQLYSAIQRHPERFKGFASISPYDVKEGVKELERAISQLGFVGWLTHSNFGEDNYLDDKTYWPLLEAAEGLNIPIYLHPNVPIMREFGKYGFALGGSALGFEFDTALCLMRMILGGVFDAFPKLKIMLGHLGETMPFLMERLDHLYRIPDLKAYRPSIQRIPSEVLRQNVYITTSGRFFVPALRYVLEVMGEDRVLFASDYPMESLLDATRFIQDSDLSNQTKQKIFSINAKNLNLI

SEQ ID NO: 8 - protein, 351 aa, Metarhizium anisopliae
MARGKINFEEAFELPTLADSSREQAALYIAPKDLDRYIYHIKHPLGERLQLANSHGIGYTIYSLTVPGIQGIPDQSKAEQHATTVNDWIANEIKDHRDRLGAFAALSMHDAAQAAAELERCVRQHGFHGALLNNYQHAGPDGETYLFYDQPAYDVFWQKCVELDVPVYLHPAAPAGNYYKQMYAQRKYLVGPPLSFANDVSLHLLGLVTNGVFDRFPKLKVVVGHLGEHIPFDFWRISHWLEDVERPLAAGRGDVMSKKDLLYYFKNNIWVTTSGHFSTPTVRYVADYLGPERIMFSVDTPYETIENGVGWFDGEEDALTRALGGEDGYKKVARENAKKLFKLTKYHDCDA

SEQ ID NO: 9 - protein, 327 aa, Octadecabacter antarcticus
MATPKITFEEHFMAPGFEKHSEAFLKLIPRDQAEILTRRLGDFDGERIETMDRGGITRSIISLTGPGTQGEAVEKAVSAAQGANDFLAEKISKKPDRLGGLATLPMHDPDAAARELNRAVNDLGLQGCLVNTHTHGAYYEGTDYDPFWAEVEKLGVPFYLHPSNAYVTPHVLGGMPVLQGATWGWGVETGSHALRILFGGVFDRFPDVKLVLGHMGEALPFLRWRYDSRFGAYPMGVSLDRAPSAYFGSNILITTSGVCSHPSLIGAIGEMGADAVMFSVDYPYEDTDLAVEFIETAPLEDATRVKICHDNAARLFGMPTLAAKEGA

SEQ ID NO: 10 - protein, 318 aa, Starkeya novella
MARKIALEEHFTTPELAGKYVARPTQSDALFADIERRLADFDELRLEMMDRAEIDLMVLSVTTPGVQGVRDTGEAIRLARGANDFLAREVQKRPSRYAGFAHLAMQDAEAAATELERAVRELGFRGALINGQTNGHYLDEDQYAPFWERVQELDVPVYLHPGNMADSPAMFAHRPELGGPIWAWTAETAAHALRLVFGGTFTRFPGAKVILGHMGETLPFLLWRLDSRREFDLGEKLAPDALPSAIIKRNIAVTTSGVCDPAPLVAALQALSDDNVMFSVDYPYEDPQLASKFIETAPIGEETRAKVCHGNAERLLGL

SEQ ID NO: 11 - protein, 343 aa, Aspergillus niger
MALGKIALEEAFALPRFEEKTRWWASLFSVDPETHVKEITDINKLRIEHADKYGVGYQILSYTAPGVQDIWDPVEAQALAVEINDYIAEQIRDKPDRFGAFATLSMHNPQEAASELRRCVQTYGFKGALVNDTQRAGPDGDDMIFYDNASWDIFWQTCTELDVPLYLHPRNPTGTIYEKLWADRKWLVGPPLSFAQGVSLHVLGMVTNGVFDRHPNLQLIMGHLGEHVPFDMWRINHWFEDRKKLLGLAETCKKTIREYFAQNIWITTSGHFSTTTLNFCMAEVGVDRILFSIDYPFETFEDACVWFDGAELNLSDKAKIGRDNAARLFKLGAFRDYDAKVKA

SEQ ID NO: 12 - protein, 338 aa, Zymoseptoria tritici
MALGKVAFEEAFALPRFKERTTWWAGLFAVDPEKHTREINDINKLRIEKMDQFGVGYTLLSYTAPGVQDVWQQEEADALAREVNDHVAAEIKGHEDRLGALATLSMHDPQTASAELRRCIKDYGFKGALVNDTQRNDESGTGMIFYDGPEWDVFWSTVQELDVPFYLHPRNPTGVFMEKLWAPRKWLVGPPLSFAQGVSLHLLGMVTNGTFDRFPNLQVIIGHLGEHLPFDLWRINHWFEDIKKPLGLDCKKTIREYFNENIWITTSGHFSTPTLEYCIKEIGAERILFSIDYPFEKFEDACDWYDGVELDGPDTVKKIGRENAKKLFKLGAFKDDSA

SEQ ID NO: 13 - protein, 339 aa, Metarhizium acridum
MAHGKVALEEAFALPRLHEKTRWWASLFAVNPDKHAAEMTDITDIRINYMDKHGVGYTILSYTAPGVQDISDPKEAQALAVEINDYVAGAIKNHPDRFGAFATLSMRNPQEAATELKRCVTQYGFKGALVNDTQRAGEDDMIFYDGPEWDVFWSTVEELDVPFYLHPRNPTGSLYEKLWAKRKWLVGPPLSFAQGVSLHVLGMVTNGVFDRHPKLQVVLGHLGEHIPFDMWRINHWFEDVKKPLGLDCKKTIREYFQQNIWITTSGHFSTTTLQFCMAEVGADRILFSIDYPFECFADACDWYDGVPINLVDKAKIGRDNARRLFKLPEFKDSEKHVDA

SEQ ID NO: 14 - protein, 351 aa, Talaromyces marneffei
MARGKVSFEEAYEIPALADKSREQAALYIAPKDLDRYLSEIKSPTGGRLDISNKNGIGYTIYSLTVPGVQGIADKAKAEKHATDVNNWIYNEIKDHRDRMGAFAALSMHDPVQAGQELERCVKKLGFHGALLNNWQHAGTDGETYIFYDHPSYDVFWQKCVELDVPVYLHPSAPSGKVFDTFFKDRRYLIGPPISFAQDVALHTMGLITNGVFDRNPKLKLILGHLGERIPQDLWRTNHWLEDVERPLADSRGDTMSRKPLLYYFKNNIYVTTSGHFSTETVKFVCDYFGADRILFSVDSPYEKIEEGAGWYDKDKDNLTKALGGPQQYLDVGRENAKKLFKLGKYHDCDA

SEQ ID NO: 15 - protein, 252 aa, Metarhizium anisopliae
MAQEIAKSHETSTRFAGFAVLPMRDPEAAAKELERAVKKLGFVGALVDHKTAHGNGFCEGNEYDVLWRKAEQLAVPIYLHPSWPTEKQFQQAYAGNYSPTAAGTIGGAMFNWHSEVGHHVLRLYAAGVFDKFPKLKIIIGHFGEMIPYMLDRIREQDHRLGKTGRTFSEVYDENIWITTSGVWSLDPMRCILANTKIDHILYSVDYPFTMNERGLEWFQELEKSGLLSEEDLALIAYKNCEKLLGVKAPTQD

SEQ ID NO: 16 - protein, 346 aa, Staphylococcus aureus
MAQNNMEANQMKSITFEEHYVIEDIQKETMNAISADPKGVPMKVMLEGLEKKTGFTNADELSHHDERIQFMNNQDVQIQVLSYGNGSPSNLVGQKAIELCQKANDQLANYIAQYPNRFVGFATLPINEPETAAREFERCINDLGFKGALIMGRAQDGFLDQDKYDIIFKTAENLGVPIYLHPAPVNSDIYQSYYKGNYPEVTAATFACFGYGWHIDVGIHAIHLVLSGIFDRYPKLNMIIGHWGEFIPFFLERMDEALFAEHLNHPVSYYFKNNFYITPSGMLTKPQFDLVKKEAGIDRILYAADYPYIEPEKLGVFLDELGLTDEEKEKISYTNGAKLLGLSSNN

SEQ ID NO: 17 - protein, 355 aa, Aspergillus niger
MARGKIALEEAFEVKGMDEEIDAQAALYIAPKDVERYKRQIVSITDERLQLSDQNGIGYSILSLTVPGIQGITDKDKAEKRARDVNNYIHDQIKDHRDRLGAFAALSMHDPRQAGHELRRCVKELGFHGALLNDVQHTGEGDDDQPLFYDQPDYDEFWRVAVELDVPVYLHPAAPLRDTLIYKQSYEDRKYLVGPPQSYCNGVALHLMGIIVNGVFDRFPNLKVIVGHMGERIPFDFWRMDHWVKGVTRPLAEKNGDTVCQKEPLYYFKRNIYITTSGHFSTQNLRYLYEWLGDERMMFSVDFPYERMEHGCQWYDDDAEKIKEALGGRDGYLRVGRDNARRLFKLTKFKDCDAV

SEQ ID NO: 18 - protein, 340 aa, Legionella pneumophila
MAIVDFETHFITEACIDYLTQRQEVPKLVPELNGAYTMCFTPDVSLFHTSALMEELLSLNEQRLAIMDQAGVTIQVLSLTTINGIDSCPGDENKSTALAREVNDQLYSAIQKHPERFKGFASISPYDVKEGVKELERAISQLGFVGWLTHSNFGQDNYLDDKIYWPLLEAAESLNIPIYLHPNVPIMREFGKYGFALGGSALGFEFDTALCLMRMILGGVFDAFPKLKIMLGHLGETMPFLMERLDHLYRIPDLKPYRPSIQRIPSEVLRQNVYITTSGRFFVPALRYVLEVMGEDRVLFASDYPMESLLDATRFIQDSDLSNQTKQKIFSINAKNLNLI

SEQ ID NO: 19 - protein, 320 aa, Talaromyces marneffei
MATPIITLEEHYISSAIRDASETDHYAVFPSQIISKLNTLSTERLQDLDNGHVSLQVISHGPGAQPPYLCQAANDELASAISANPTRFAGFALLPIAEPQLAVQELERCITQHKFVGALIDNHTNGQFYDDQKFWPVFEKAQELDAPIYVHPSYPDEESGVAAHYRGNYDDRIAAALGAYGWGWHSDTALSILRLFAAGLFDTYPNIKIIIGHMGEMLPFQLERVIGIASRFGRSRGLREVWTQNIWVTTSGMFALAPLACLLQTMPIERVLYSVDYPFSANEKGFAFLEEIKKSGLIKEGEDWERFLYKNAQELLKVNV

SEQ ID NO: 20 - protein, 340 aa, Legionella pneumophila
MAIVDFETHFITEACIDYLTQRQEVPKLVPDLNGAYTMCFTPDVSLFHTSALMEELLSLNEQRLAIMDQAGVTIQVLSLTTINGIDSCPGDENKSTALAREVNDQLYSAIQRHPERFKGFASISPYDVKEGVKELERAISQLGFVGWLTHSNFGQDNYLDDKTYWPLLEAAEGLNIPIYLHPNVPIMREFGKYGFALGGSALGFEFDTALCLMRMILGGVFDAFPKLKIMLGHLGETMPFLMERLDHLYRIPDLKAYRPSIQRIPSEVLRQNVYITTSGRFFVPALRYVLEVMGEDRVLFASDYPMESLLDATRFIQDSDLSNQTKQKIFSINAKNLNLI

SEQ ID NO: 21 - protein, 328 aa, Agrobacterium tumefaciens
MAQGKVALEEHFAIPETLQDSAGFVPGDYWKELQHRLLDIQDTRLKLMDAHGIETMILSLNAPAVQAIPDRKKAIEIARRANDVLAEECARRPDRFLAFAALPLQDPDAATQELQRCVNDLGFVGALVNGFSQEGDGQTPLYYDLPQYRPFWGEVEKLDVPFYLHPRNPLPQDSRIYDGHPWLLGPTWAFAQETAVHALRLMASGLFDAHPRLNIILGHMGEGLPYMMWRIDHRNAWVKLPPRYPAKRRFVDYFNENFHITTSGNFRTQTLIDAILEIGADRILFSTDWPFENIDHASDWFNATTIAEADRVKIGRTNARRLFKLDGR

SEQ ID NO: 22 - protein, 335 aa, Staphylococcus epidermidis
MAKSINFEEHYVVDDIQKETMKYMSSDPNGVPMQTMLKGLEQKSGFTNADDITKHDERIKFMDEHDVEMQVLSYGNGAPSNLEGERAIELCQQANDTLAKYVNEHPDRFVGFATLPINEPQAAVEEFKRCIKELGFKGALIMGHPKNGFLDQDQYDDLFATAEALNVPIYLHPSPVQSDVYQAYYKGNYSDVTAATFACFGYGWHVDVGIHAIHLVLSGVFDRHPNLNMIIGHWGEFVPFFLERMDDILFADHLEHPISYYFKNNFYITPSGMLTKPQFDLVKAEVGVDRILYSADYPYVEPDKLGTFLDELDLTEEEKEKISYKNGAKLLGLEK

SEQ ID NO: 23 - protein, 374 aa, Aplysina aerophoba
MAIDIDARSQPGLETARRAMSRRDFLGGAAAFGITAAATTALPASTAAGEEEDLFLLGLEEHFATAELRRLNGIQFPQGTPRFDINDVGAGRIADMDAAGIDIQVLSALTPGAQNLPGAEGVAYARRLNSWVAHEVIPAYPGRFRAFATLPLSEPQAAADELEYAVRELGFLGCMTYGAVDGKFLDHADFVPVLARAETLDVPIYIHPNWASPQVMDTYYNGLGNEWVSRVLSGAGYGWHQEVALQCLRMIASGVFDRFPRLQIIVGHMGEGLPFFYWRFGDDLARITADTLEKPVQQYFHDNFWITTSAFFRDELLRLVLSVMGEDRVMFAVDYPFVSNKVGADWFRAVDLPRNVKEKIAHKNAERLLKIGPF

SEQ ID NO: 24 - protein, 352 aa, Aspergillus niger
MALGKVVLEEAYERPNMKEKSNHEAGLYIAPNDRPRYMRQINDINQERLKLADAHGVGYTIISLTVPGIQGIFDKTEAERVATETNNWAAEQIKNHRDRLGAFACLSMHDPAQAANELRRCVQELGFHGALLCSFQHAGPDGETYLFYDQPKYDVFWKALTELDVPLYIHPAAPTGSILERLYAQRPALIGPPLSFANDVSLHTLGIISNGVFDRFPNLKIIIGHLGEHIPFDFWRIDHWFRDVKKPIADEEGRVMAQKSLYHYFKHNIWLTTSGHFSTPTLKYVVNEIGVDRVLFSVDYPYETTESGCNWWDHDKDAIVEAVGGVDNYYAIGRENAKKLLRLDKFHDSDAR

SEQ ID NO: 25 - protein, 328 aa, Acidovorax avenae
MAQGKIGLEEHFAIPETLQDSAGFVPGDYWKELSLRLLDIHERRLREMDENGMEMMILSLNAPAVQAIPDTKKAVEIAVRANDFLAEQVARRPDRFQAFAALPMQDPDLATRELERCMQDLGFRGALVNGFSQVGTPENVVYYDAPQYGDFWAAVERLDAPFYLHPRNPIASWAQIYQGHPWLMGPTWAFAQETAVHALRLMASGLFDRHPGLRIILGHLGEGLPYNMWRVDHRNAWVDMPKGYPAKRKLCDYFHENFYLTTSGNFRTQTLIDALLEVGADRILFSTDWPFENVDHAAHWFDDAAISEADRLKIGRTNALSLFKLPQG

SEQ ID NO: 26 - protein, 330 aa, Variovorax paradoxus
MATHMAPMKNKIALEEHFAIDLTIADSQVYARPEVWQGLKSNLLDFEQQRLEKMDEWGTEFSILSLNSPAVQGIPDAKRAIEVAQRANDVLAEQVKRHPTRFGGFAALPMQDPEASARELERCVNQLGFHGFLVNGFSQVGDENIVVYYDDARFNDFWTAAAALKKPFYMHPRDPLLAREPIYDGAHWLTGPTWAFAMETAIHALRLMSSGMFDRHPALQMILGHFGEGIPFNIWRVDHILRKGRRGMPCDKEIGEYLRSNVHITTSGNFRTPTLLSTMLEVGSDRIMYSVDYPFEKHEDAARWFDTCEISENDRQKIGRDNARKLFGLK

SEQ ID NO: 27 - protein, 339 aa, Aspergillus oryzae
MALGKIALEEAFALPRFEEKTRWWASLFSTDAETHVKEITDINKIRIEHADKHGVGYQILSYTAPGVQDIWDPVEAQALAVEINDYIAEQVRVNPDRFGAFATLSMHNPKEAADELRRCVEKYGFKGALVNDTQRAGPDGDDMIFYDNADWDIFWQTCTELDVPFYMHPRNPTGTIYEKLWADRKWLVGPPLSFAHGVSLHVLGMVTNGVFDRHPKLQIIMGHLGEHVPFDMWRINHWFEDRKKLLGLAETCKKTIRDYFAENIWITTSGHFSTTTLNFCMAEVGSDRILFSIDYPFETFSDACEWFDNAELNGTDRLKIGRENAKKLFKLDSYKDSSA

SEQ ID NO: 28 - protein, 335 aa, Sphingomonas paucimobilis
MARLIATEEAVTFQPVVDALRAHSRTDDASLDMILVRDVYGDEPARPAMIGRLSDVTGERLAEMDSNGVDMHLLSLTAPGVQMFDAETGTRLARIANDLMAQTVAANPTRFAGLGTFAPQDPASAAREIERVATQLRLNGLVINSHTNDLYYDDPFFHPVFEAIEASGLALYIHPRAPSKQIDRAFRDYGMNSAIWGYGIETSTNAVRMILSGLFDRFPRLKIVLGHMGEAIPFWLWRLDYMHGNATTFGGAPKLKLKPSEYFRRNFAITTSGVESHAALRYSIEVLGPENVMWAIDYPYQPMAPAVQFIRTAPIPEDVKAMVAGGNAARIFRIT

SEQ ID NO: 29 - protein, 363 aa, Pseudovibrio sp.
MAGRRDFLRKSVAAGVGLTAAAQLSAGGAQATVPDTSNIPLITLEEHFTTPELQSKNTSGDKRLFSGGGSRPELLDVGAGRIADMDEAGIDIQVLSTVTPGASKITGAEGVEFTRKFNTWIAEEVIAAYPNRFRAFATLPLSSPEAAADELERSVREYGFVGTMTYGPIDGKFLDHADYAPLLARAEALGVPIYIHPNWPSPTAMQAYYDGLGDDLTSRILSGPGYGWHQEIAVQCLRLIVGGVFDRFPNLQIVVGHMGEGLPFYYWRVGEDLDRIAQKRLQKPVQQYFHDNLWITTSAFFRDELLNLALATMGEDRVMFSVDYPMASAKVGADWLRAADIPLATKEKIGSKNAMKLLGIDKI

SEQ ID NO: 30 - protein, 333 aa, Enterobacter aerogenes
MARGKIALEEHVSTPENNRLWDSTGEANRNGSEYMQDVERRLLDRSIQLEEMAQRNIDHVILSLTSPGAQSILDKAKAVSFARDTNDFIVDNYVKPNPDKFSAFATLALQNPEAAAEELERAVKKLGMKGALINGYTNVKDSEHGLYLDDESMLVFWDKVNELNVPVYLHPREPLEGPARGIYTGYESLIGSAWGFAQETAVHAIRLMMSGLFDRYPNLNLVLGHLGEGLVHMLPRTQHRLYRQRFGCGLGKAEKPLMHYLQNNFIVTTSGHFNTHSLNNAIEVMGADRVMFSVDYPYEDIHQACDWFDPLEMDEGLKEKIAWGNASRVFNIK

SEQ ID NO: 31 - protein, 328 aa, Agrobacterium sp.
MAQGKVALEEHFAIPETLQDSAGFVPGDYWKELQHRLLDIQDTRLKLMDAHGIETMILSLNAPAVQAIPDKTKAIEIARRANDVLAEECAKRPDRFLAFAALPLQDPDAATEELQRCVNDLGFVGALVNGFSQEGDGQTPLYYDLPQYRPFWGEVEKLDVPFYLHPRNPLPQDSRIYDGHPWLLGPTWAFAQETAVHALRLMASGLFDEHPRLNIILGHMGEGLPYMMWRIDHRNAWVKLPPRYPAKRRFMDYFNENFHITTSGNFRTQTLIDAILEIGADRILFSTDWPFENIDHASDWFNATSIAEADRVKIGRTNARRLFKLDGA

SEQ ID NO: 32 - protein, 334 aa, Streptomyces violaceusniger
MARIIAIEEHFLDLDIARASRPEAERLSPAFAAAYGAGQGYNYSPAPEVLLDLEEGRVADMDAHGISMQVLSSLSTQQLPADVAVELVRKVNDRAAAAVAARPDRFAAFAALPTTVPEAAADELDRAVGELGFVGSMINGRTGDAFLDAPRFDAVLRRSAELRVPVYLHPGVPPVETSRSNYEGGLDPIVTARLQTSAWGWHVETGIHFLHLVLAGVFDRYPDLQVILGHWGEMVPFFLERIEEALPQQITHLDRPVGAYFRENAHITPSGMFSQAQLQFCVETVGIERIMFSVDYPFLGNDGAEAFLRQANLPPLATEKIAHLNAERLLALPS

SEQ ID NO: 33 - protein, 327 aa, Rhizobium leguminosarum
MAQGKIALEEHFAIPETLQDSAGFVPGDYWKELSARLLDIQEKRLRLMDAHGIEKMILSLNAPAVQAIPDRAKALEISRRANDFLAEQCVKNPNRFLGFAALPLQDPDAATQELQRCVTTMGFVGALVNGFSQEGDGTTPLYYDLPQYRSFWAEVEKLNVPFYLHPRNPLPQDSRIYAGHSWLMGPTWAFAQETAVHALRLMGSGLFDEHPALRIIVGHMGEGLPYMMWRIDNRNAWVKVEKSYPAKRPIADYFNENFYITTSGNFRTQSLIDAMLEIGADRILFSADWPFENIDHAANWFDSATISEADRLKIGRTNAVSLFKLDR

SEQ ID NO: 34 - protein, 327 aa, Cupriavidus necator
MAQGKIGLEEHFAIPETLNDSAGFVPGDYWKELSRRLLDIQDDRLRQMDENGMEMMLLSLNAPAVQAVPDRKQACELAVRANDFLAEQVSRRPDRFQALAALPLQDPDFATVELTRCVNELGMRGALVNGFSQIDTPDNVVYYDAPQYASFWAAVEKLDVPFYLHPRNPIASWAQIYDGHPWLLGPTWAFGQETAVHALRLMASGLFDRHPALQIVLGHLGEGLPYSLWRIDNRNAWVKAPKTHPAKKTFRHYFQQNFHLTTSGNFHNQTLIDAILEIGADRILFSTDWPFENIDHAAKWFDSASISEADRTKIGRTNAMKLFKLVA

SEQ ID NO: 35 - protein, 330 aa, Burkholderia sp
MAFKASRKIALEEHFAIDATVQDSAGFVPPSYWAELKRRLLDIHDRRIDEMDRNGVELMVLSLNAPTVQAVPNIKDAYDLSRRANDFLAEQIVKRPERFKGFAALPMQSPDLAARELERCVKELNFVGALVNGFSQVEESGTALYYDLPQYRQFWSVVQALDVPFYLHPRNPLPAHAPIYEGHPWLLGPTWAFGQETAVHALRLMGSGLFDEYPELKIILGHMGEGLPYSMWRIDNRNAWVETQPNYPAKKRIAEYFHKNFWLTTSGNFRTQTLIDAMLEIGSDRILFSTDWPFENVDHAAQWFDDAAISENDRIKIARTNAARLFKLEP

SEQ ID NO: 36 - protein, 328 aa, Agrobacterium sp.
MAQGKVALEEHFAIPETLQDSAGFVPGDYWTELQHRLLDIQDTRLKLMDAHGIETMILSLNAPAVQAIPDKTKAIEIARRANDALAEECAKRPNRFLAFAALPLQDPDAATQELQRCVNDLGFVGALVNGFSQEGDGQIPLYYDLPQYRPFWGEVEKLDVPFYLHPRNPLPQDSRIYDGHPWLLGPTWAFAQETAVHALRLMASGLFDEHPRLNIILGHMGEGLPYMMWRIDHRNAWVKLPPRYPAKRRFVDYFNENFHITTSGNFRTQTLIDAILEIGADRILFSTDWPFENIDHASDWFHATSIAEADRVKIGRTNARRLFKLDGR

SEQ ID NO: 37 - protein, 330 aa, Burkholderia gladioli
MATFSNVKKIALEEHFAIAETIEDSAGFVPPDDWVELRGRLLDIQERRLAEMDRAGIELMVLSLNAPAVQAIRDPRQAVELARRANDYLAEQVARRPDRFRAFAALPMQAPEQAIREAERCVRELGFVGALVNGFSEAEDGAELYYDLPRYRPFWAALEALEVPFYLHPRNPLAGRAPIYDGHSWLMGPTWAFGQETAVHALRLMGSGLFDAHPRLQIILGHMGEGLPYSMWRVDNRNAWVSAKPNYPAEKPIAEYFRNNFWLTTSGNFRTQTLIDAMLEIGSDRILFSADWPFENMDHAADWFDHASISENDRIKIGRGNAERLLKLGR

SEQ ID NO: 38 - protein, 326 aa, Variovorax paradoxus
MAQGKIGLEEHFAIPQTLQDSAGFVPGVYWKELSSRLLDIHDGRLRQMDEHGMEMMILSLNAPAVQAVADPVKAYELAVRANDFLAEQVAKRPDRFQAFAALPMQDPEKATQELERCMSVLGFRGALVNGFSQVGTPDNVAYYDAPQYAPFWAAAERLDAPFYLHPRNPIASWAQIYEGHPWLLGPTWAFAQETAVHALRLMASGLFDRHPGLKIILGHLGEGLPYNMWRVDHRNAWVKAPKGYPAKRKLCEYFQENFYLTTSGNFRTQTLIDAMLEVGSDRILFSTDWPFENIDHASNWFNDTSISEADRKKIGRTNAMSLFKLA

SEQ ID NO: 39 - protein, 328 aa, Agrobacterium fabrum
MAQGKVALEEHFAIPETLQDSAGFVPGDCWTELQHRLLDIQDTRLKLMDAHGIETMILSLNAPAVQAIPDKTKAIEIARRANDALAEECAKRPDRFLAFAALPLQDPDAATQELRRCVNDLGFVGALVNGFSQEGDGQTPLYYDLPQYRPFWGEVEKLDVPFYLHPRNPLPQDSRIYDGHPWLLGPTWAFAQETAVHALRLMASGLFDEHPRLDIILGHMGEGLPYMMWRIDHRNAWVKLPPRYPAKRRFVDYFNENFHITTSGNFRTQTLIDAILEIGADRILFSTDWPFENIDHASDWFHATSIAEADRVKIGRTNARRLFKLDGR

SEQ ID NO: 40 - protein, 330 aa, Rhodococcus jostii
MAQGKIALEEHFAIPETLNDSAGFVPGTYWDELQARLLDIQDVRLKLMDEHNIETMILSLNAPAVQAIPERERAIDIARRANDVLAEECAKRPDRFRGFAALPLQDPDAAAEELRRCVTELGFVGALVNGFSQSATVDGGSTPLYYDLPRYRPFWAEVERLDVPFYLHPRNPLNQDARIYEGHPWLLGPTWAFAQETAVHALRLMASGLFDEHPGLRIVLGHMGEGIPAMLWRIDHRNAWVDVPPAYPAKRRMVDYFTENFFVTTSGNFRTQTLIDLLLELGSERVMFSTDWPFENINHAAEWFDAASISEADRLKIGRTNAATLFKLDR

SEQ ID NO: 41 - protein, 327 aa, Polaromonas sp.
MANGKIALEEHFATEETLMDSAGFVPDKDWPELRSRLLDIQDRRVRLMDEHGIETMILSLNAPAVQAIADSTRANETARRANDFLAEQVAKQPTRFRGFAALPMQDPELAARELERCVKELGFVGALVNGFSQDNRSAVPLYYDMAQYWPFWETVQALDVPFYLHPRNPLPSDARIYDGHAWLLGPTWAFGQETAVHALRLMGSGLFDKYPALKIILGHMGEGLPYSMWRIDHRNAWIKTTPKYPAKRKIVDYFNENFYLTTSGNFRTQTLIDAILEIGADRILFSTDWPFENIDHAADWFENTSISEADRKKIGWGNAQNLFKLNR

SEQ ID NO: 42 - protein, 327 aa, Agrobacterium radiobacter
MAQGKIALEEHFAIPDTLQDSAGFVPGDYWKELSARLLDIHEQRLMQMDAYGIEKMILSLNAPAVQAIPDKAKALEISRRANDFLAEQCARNPDRFLGFAALPLQDPDAATAELQRCVKTLGFVGALVNGFSQEGDGVTPLYYDLPQYRGFWAEVEKLAVPFYLHPRNPLPQDSRIYAGHPWLMGPTWAFAQETAVHALRLVGSGLFDDHPALRIILGHMGEGLPYMMWRIDNRNAWVKVAPNYPAKRRIADYFNENFYITTSGNFRTQSLVDAMLEIGADRILFSTDWPFENIDHASDWFDTATISEADRLKIGRTNAATLFNLES

SEQ ID NO: 43 - protein, 327 aa, Rhizobium leguminosarum
MAQGKIALEEHFAIPETLQDSAGFVPGDYWTELSARLLDIQDKRLRLMDTHGIEKMILSLNAPAVQAIPDKAKAVEISRRANDFLAEQCVKNPNRFLGFAALPLQDPDAATQELQRCVTTMGFVGALVNGFSQEGDGTTPLYYDLPQYRPFWAEVEKLDVPFYLHPRNPLPQDSRIYAGHSWLMGPTWAFAQETAVHALRLMGSGLFDEHPALRIIVGHMGEGLPYMMWRIDNRNAWVKVEKSYPAKRPIADYFNENFYITTSGNFRTQSLIDAMLEIGADRILFSADWPFENVDHAANWFDSATISEADRLKIGRTNAVSLFKLDR

SEQ ID NO: 44 - protein, 329 aa, Mycobacterium avium
MARIITVEEHFQHPEVSARVAELTGPAVEGLAEFGNAFSLDPDSTARLGGNRLAHMDQVGIDVQVVSHGNGSPGTLQHPEAVELCRRVNNDLAAQIAENPDRFRGFATLPLYDPAAAAEELRRCVGDLGFVGALIAGSYDGLFLDDERFDPILTAAEAVDFPIYVHPGLPEAPVSQRYYAGSWPASVHMMFSGPAFGWHAEAGIHIVRLILSGALDRHPTLKLLSGHWGELAAFYLERLDETLGLLPTGLERAPSDYYRQQVWITPSGMYNQNQLNFMTAELGAQRIIYSEDFPYVVRDNVSTFLEQAGLSEADTHAIAHTNAEALLRI

SEQ ID NO: 45 - protein, 241 aa, Mycobacterium sp
MANDDLAEVIAAHPDRFAGFAALPMRDPQAAAVELQRAVGTHGFCGAMINGLIEGRFLDDPAFAPLLSTAADLGVPLYLHPSFPPPQVAEIYFGGLAPVLGDLLATAGWGWHAETALHVLRLVATGVFDRLPELWVIVGHMGEMIPFALARIDTVLSPVAQLRQPVAQYFQTNVWFTTSGYTTFPPLQCALSTVGIDRLIFSVDYPYTDNTSARALLDTAPISPVDREKLAHGTVEALLRV

SEQ ID NO: 46 - protein, 331 aa, Rhodococcus opacus
MARIITLEEHYLDPAIAAASAPLARELSPDFAAAYDPASGLSYTPSAQVLQDLGQRRIADMDTHGISMQVLSCLTTQQVPADVAPDLVRAANDTAAAAVRAHPDRFAAFAALPTTAPDAAATELARCIDDLGFVGTMINGRTDGEFLDAPRFDPILATAAARNVPIYLHPAVPPRATSDSNYAGLAPLVTARLQTSAWGWHQETAVHFLHLVLSGVLDRYPNLQFILGHWGEMIPFYLDRLDEALPQAVTNLDRTISDYVRENVYITPSGMFNQAQLQYCVETLGVDRILYSVDYPFIGNDGAVSFLDEANLPDEAKHQIAHQNTEKLLGL

SEQ ID NO: 47 - protein, 345 aa, Serratia odorifera
MAKIICLEEHTLDKALVMASMPAALAQAPFLSDWGKTITDGNLPDRSRPQIEKNDLINVKGADIGRGRLDDMDEAGITMQVLSVGGFPHLISAAEGVDLNRAANDRLANAVNAHPDRFAAFATLPWAQPDAAEKELERAVKELGFKGALLNGRPSIHFLDHPDYDGLLARFNALGVPLYLHPGLPVRSVQQAYYSGFSDEVTARLSMFGWGWHHEAGIHLLRLILSGAFDKYPNLQVISGHWGEMLPFWLQRLDDSLPQAATGLRRTITQTFREQVYVTPSGMLTLPHFQFIYALLGAERILFSVDYPYQTLDGVKAFIQSLPVPEEAKEAIAFRNAERLFGLTS

SEQ ID NO: 48 - protein, 332 aa, Amycolatopsis mediterranei
MASMKLYGLEEHFVTADVIEAWRRRDPGLAEPMMKWAVASDITPALLDVDGGRIAAMDDAGIDTTVLSLTTPGLQNLDAAEAVALQAPTNDLIAAAVRRHPGRFQGFATLATSAPAAAADELRRAVTELGLNGALVNANSRGRALDAPGFWDIYEAAEDLRAPVYLHPGVPVPAVTEAYYRGFGEPVNSMLATGAFGWHYDAGLTILRMIVAGVFDRFPGLQVILGHWGEVVLFYLDRVAAMDKLTALRRPIAEYFRSNIFITPGGISSHKYLRWSLETVGVERIMYASDYPFNTERAGSARRFLDTAPVDEAGRERIAYRNWEELIAGIRR

SEQ ID NO: 49 - protein, 332 aa, Streptomyces sp.
MAKIIALEEHFSDPAVAKAGAARARALSPGFAASYSPASGLPYSPSPEVLENLAEKRLADMDAGGITMQVLSGLGAQTVPADVAPALVAGSNDKAAAAVRAHPDRFAAFAALPTATPEAAVAELDRSVNELGFVGTLIMGRTEGEFLDAPRFEPILARAAALKVPVFLHPGVPPREITDSNYAAGLPTGIGTRLQTAAWGWHQETAVHFLHLVHSGVLDRYPDLQFILGHWGEMIPFYLDRVDEALPQRATGLDRSFHEYFRENVYLAPSGMWSQAQLRFCLETVPLERIVFAVDYPFIGNEGAVPFLEKAELPQADKRKIAHENAERLLGL

SEQ ID NO: 50 - protein, 332 aa, Streptomyces sp.
MARIVTLEEHWTDPAVTAAGMPNLLDHVPGYAAAFDPDTGMPYPRHPELLEDLGAARIADMDRHGITTQVLSLVNTFLPADVAPRLTAAANDAMAAAVEAFPGRFAAFATLPTAVPGAAADELRRCVGELGFVGTMIMGRTDGEFLDQPRFDPILRAASDLSVPVYLHPAPPPVAVSEASYAGGLSPAVSAAFRLAAWGWHQETAVHLLHLVLAGVLDRYPGLQFVLGHWGEFIPFYLDRLDESMPRRMTGLDRTFREYFRDNVFITPSGMFSQAQLRYCADTVGTDRIIHSVDFPMLGNEGAVSFLTDSHLSREDQEKIAHGNADALLGLG

SEQ ID NO: 51 - protein, 320 aa, Mycobacterium gilvum
MARVIAIEEHYAHPGLQPAEALANLRKHPQLARIQDKLEDLGAGRLADMDAAGIDMQVLSHTVPGAEALPAAQAVDVVRQTNDDLAEVIAAHPDRFAGFAALPMRDPQAAATELQRAVGTLGFCGAMINGLIEGRFLDHPDFTPLLSTAADLGVPLYLHPSFPPPQVAQIYFGGLPPVLADLLATAGWGWHAETALHVLRLISTGVFDRLPELRVIVGHMGEMIPFALARIDTVLSPMTELRQPVAQYFQTNVWFTTSGYTTFPPLQCALSTVGIDRLIFSVDYPYTDNASARALLDTAPISPVDREKLAHATVEALLRV

SEQ ID NO: 52 - protein, 332 aa, Streptomyces sp.
MAKIIALEEHFSDPAVAKAGAARAQALSPGFAASYSPASGLPYSPSPEVLENLAEKRLADMDAGGITMQVLSGLSAQTVPADVAPALVAGSNDKAAAAVRAHPDRFAAFAALPTAAPEAAVAELDRSVNELGFVGTLIMGRTEGEFLDAPRFEPILARAAALKVPVFLHPGVPPREITDSNYAAGLPTGIGTRLQTAAWGWHQETAVHFLHLVHSGVLDRYPDLQFILGHWGETIPFYLDRVDEALPQRATGLDRSFHEYFRENVYLAPSGMWSQAQLRFCLETFPLERIVFAVDYPFIGNEGAVPFLEKAELPEADKRKIAHENAERLLGL

SEQ ID NO: 53 - protein, 323 aa, Granulicella tundricola
MARTITLEEHFVTDSFLRATGAYDKPAPPWLAQLQPKLLDLGDGRIAAMDEAGIDLQVLSLAALGFDALDAATATPLVHDINDELAAAVRANPTRLAAFASLALKDPQSAARELERAIQKLGFRGVLLDGTTDGLFLDDPRFTPVFEAAVALNVPIYLHPAPPPESVFDTYFTGLPEGVGQMLSIAGWGWHAETALHTLRLITNGVFDRYPTLQLIIGHMGEMLPMALARTSKALSHAARLRQPVAAYFQSNIHLTTSGYFTQPPLRCALDVVGIDRLMFSIDYPFSANTLGRDYLTELEQTLTPEDLAKLIHRNAESLLNLS

SEQ ID NO: 54 - protein, 332 aa, Streptomyces sp.
MAKIIALEEHFSDPAVAKAGAARAQALSPGFAASYSPASGLPYSPSPEVLENLAEKRLADMDAGGITMQVLSGLGAQTVPADVAPALVAGSNDKAAAAVRAHPDRFAAFAALPTAAPEAAVAELDRSINELGFVGTLIMGRTEGEFLDAPRFEPILARAAALKVPVFLHPGVPPREITDSNYAAGLPTGIGTRLQTAAWGWHQETAVHFLHLVHSGVLDRYPGLQFILGHWGEMIPFYLDRVDEALPQRATGLDRSFHEYFRENVYLAPSGMWSQAQLRFCLETVPLERIVFAVDYPFIGNEGAVPFLEKAELPEADKRKIAHENAERLLGL

SEQ ID NO: 55 - protein, 345 aa, Serratia sp.; identical to SEQ ID NO: 2

SEQ ID NO: 56 - protein, 345 aa, Enterobacter aerogenes
MAKIICLEEHYLDSELGRACMPVALEQAPFLGDWGKTVADGHNPDRSRPQIEKNALINAKGADLGSRRLRDMDEAGITLQILSVGGFPQLAPEDEAVTLNTAANDRLAEAVRNHPDRFAAFATLPWAQPKDAENELVRAVEKLGFKGALLNGRPSSCFLDHPDYDSLLSRFNKLNVPLYLHPGLPLKSVQQAYFTGFSAEVNARLSMFGWGWHHEAGIHLLRLMLSGAFDKYPNMQVISGHWGEMLPFWLQRLDDSLPLAATGLSRTLTRTFQEHVYVTPSGMLTLPHFKFIYELMGAERILFSVDYPYQTLDGVKTFIDSLPVNKAEKEAIAFRNAERLLGITA

SEQ ID NO: 57 - protein, 344 aa, Collimonas fungivorans
MAKLICVEEHVLDPAVGAATQSLVRAEAPYLPDWGSRVLDGRHVADRSRPHVIAPSESARKALEMGEPRLADMDAASIDMQVLSYGGFPQLLPAAQAIDLNRAANDKLALAAQAHPARFAGFATLPWQAPEAAARELERAVKQLGLKGALINGRPGDTFLDDARYAPILAAFDELKVPLYVHPGLPLPAVQAPYYGGFERELSARLAMFAWGWHNEAGIQVVRMLLAGVFDRHPRLQLISGHWGEMVPFFLQRLEDSIPQEASGLQRPIVQTYREHVYISPSGMFTLPHFQFIHALMGAQRILYSIDYPYQSLDGARAFIERLPISDTDKALIAHRNAERLLHL

SEQ ID NO: 58 - protein, 317 aa, Mycobacterium colombiense
MARVIALEEHYATTEFLRGPGTWLASRPGIVEPAGDLGDGRIAAMDQAGVDLAVLSLAAPGVEQLDPDDAVRLARDCNDQLAAAVRRYPDRLAGFATVPTSAPDRAADELERAVRGLGFPGAVINGHSRGRYLDDPFFEPVLARAAELQAPIYLHPTIPPAGVIESSYAGFAEPVTFALATVGWGWHINTATHALRMILGGVFDRHPSLQMIIGHMGEATSFMLPRFDATLKPELTGLNHPVSSYLRENFHYTFANFNDHATYANLVAQVGIERVAFSADYPFGSMVDARAFLDGLPLSDDERAAISHRNAEKLLGL

SEQ ID NO: 59 - protein, 334 aa, Unknown
  alpha proteobacterium
MAPSVIDAHAHFLPGSLVTALRSRSDAPDIRTDSNGGESFGIYRTRMPYGRTYDALDVRLARMDELGVDRQILSLPGLFGIDSRPVSQALPLVRAFNDGVADLVRKHPDRFSGIAALPLADLDAAQEEYRRARGDLGLSGLILPGDTFVSVAAAERVRPLFELAATIGGLIFVHPGPLPDETGSAVDAPAPHTDSVVHRRVTVDIQNRMTEVMVTLALTDFLAPYPSVPVQVANLGGSLPFVIERMDHVYALRNPEAPPPSLSLRSLYVDAASLGPRAIALAAEVYGADRVLFGSDYPIFDDGRCLDAVRQTRLSPDARALIAGGNAARMLTQT

SEQ ID NO: 60 - protein, 351 aa, Catenulispora acidiphila
MARGFVRTAVVPGFWDAGWRGAGQPGGMRVDVHAHLFPAAYLDLLDDFRQDGGVGTREVRALGGGDGERELRLRLAAMDAVGVDVQLLSTCPQGPYTGDPTAAVEAARCANVALAQTVAQYPERLRALAALPLPHILASVDELNRAMEQDGMLGAAVGTSILGRPLSHPDFEPLFAALNRRKGVLFVHPIGESAGSPLMQASKLDRVIGYAAEVSTAILQLFQAGLTVKYPDIRIIAPHMGGYLPFLIQRLDRHRDWYLPKDAPSAGQLMRGIAYDTANPLPAALRLTAEVVGPERLLLGTDYPFEQGPSLRDHIEYILAAGLPEAQAKMIVDVNAADFLDMRSGAEQPPV

SEQ ID NO: 61 - protein, 352 aa, Gordonia amarae
MATGAGSGVPSPADRVIVRSPGVIDVHAHAVLPMSLGCAGAAGPEIGYREDGSPFFRVGEYVLNGVRYEGSAFMDPEVRVAAMDAAGIGLQMISPNPITYFTRLDARSATDYARAHNDAIAEAAGRHPGRLVGAAQLPMQDVPAAIAELERSVRELGLVAAYIDTDIGDRTLDAPELDDFYSAAVELDVPVFIHPSPVGQEGPPDDTRLRRFDLDLLLGFSYDETLAVAALVFGGVLERHPALDVCLSHGGGTLAFVAGRFARAVAKPRAWVPEFLVENGIESYLRRLWLDTHVHSAGSLRLLIDTVGTDRLVFGTNFAGWDADGATEVDALGDLRETTTANAAHLLRLGRA

SEQ ID NO: 62 - protein, 305 aa, Bacillus thuringiensis serovar pulsiensis
MAVGGKNFRDVTDQVWCPKKRIEDMDREGVDIQVLSPIPVTFSYWAKPEEAESMARIQNDFIAETVLAYPDRFVGLGTVPMQDGETAIREMERCITELNLHGIEIGTNVNGKNLDDPSFIEFFRMAEKWQVPIFIHPWETLGRDRMPHHNFMYTVGMPSETALAAATLIWSGIMEKFPRLKVCFAHGGGSFPYILPRLDQGWKVWPHLRLTTHPPSYYAKKFYFDSLNYDPINLKYMIERFGHEKIFMGSDYPFLLREVDPGKVIDETASLSEEQKAAMLGGNAAEFLNIDIKKRGVAYAESTNT

SEQ ID NO: 63 - protein, 368 aa, Aspergillus flavus
MAPPSLPDLSSYPSNSTDSPWLSLRPNTKNPEDTDMYVGDHFFRTVNRNCYDVNTRLAEMDAAGTDIQVLSTIPILFFYDQPAEPVTILARHLNNHIAALCAQHPARFLGLATVPLQDVPAAIAELHRAKNELHLHGVEIGTTIDGMTLDDPQLDPFWQACEELEMPIFIHPLGYTWPKENPKLWSKYWSSWLVGMPSETALALHLLICSGTLLRFPRLRLCFAHAGGSFPALLGRIQHGYDCRPDLVATDAGGVTPMEHATVRDNIWIDSLTHDVDLLEFLVKKVGAHRIVMGSDYPFPLGEVPEAGRMIARDKRLEKFLSWKQRADMLAGNALRFLNLDADEKWRDLVEMRLRASEKRHGSKHYLS

SEQ ID NO: 64 - protein, 342 aa, Achromobacter piechaudii
MAIQKIDMHAHFFPPITRQEAAALDPVNAPWLRPDADGATGQIMAGEREFRPVDATLWDPALRIEQMDRHGVDVQILCATPIMFGYTYPARPAADWAARMNDLALEHCAYAPSRLKALAQVPLQDLELACQEASRARAAGHLGVQIGNHVGPRDLDDETLVQFLIHCANNDIPVLVHPWDMMTDGRMKKWMLPWLVSMPAETQLGILSLILSGAFERIPRSLKLCFAHGGGSFAYLLGRVDNAWRHRDIIRQDCPQLPSSYTDRFYTDSAVFDPRSLRLLIDVMGEDRVLLGSDYPYPLGEQEVGRLVAHAELVPEVQQKILFRNTMTFFGLQPGLQPGLQS

SEQ ID NO: 65 - protein, 337 aa, Ailuropoda melanoleuca
MAKIDVHSHILPKEWPDLKKRFGYGGWVQLQHHNKGEAKMMKDGKVFRVVQENCWDPEVRIREMDQTGVTVQALSTVPVMFSYWAKPQDTLDLCQLLNNDLAATVANHPRRFVGLGTLPMQAPELAVKEMERCVKELGFPGVQIGSHINEWDLNAKELFPVYAVAEKLNCSLFVHPWDMQMDGRMAKYWLPWLVGMPAETTTAICSMIMGGVFEKFPKLKVCFAHGGGAFPFTVGRISHGFNMRPDLCAQDNPINPKKYLGSFYTDSLVHDPLALKLLTDVIGKDKVILGTDYPFPLGELEPGKLIESMEEFEEETKDKLKAGNALAFLGLERKQFE

SEQ ID NO: 66 - protein, 341 aa, Amphimedon queenslandica
MASGIKVDIHNHILPERWPDLKERYGYGGWIQLHHHCQGKARMLKDGQLFRVVDENCWSPEARIKDMDNTGVTVQALSTVPVMFSYWAKPEDTLDLCKILNNDLAQTVAKFPKRFVGLGTLPMQAPELAVQELKRCIKELGFPGVQIGSHVNEWNLDATELQCVFAAAEELNAAVFVHPWDMETGGRMSKYWLPWLVGMPAETATAICSVLFGGVLERHPNLKICFAHGGGSFPYTIGRIEHGFNVRPDLCATENSVNPRSYIGKVYTDSLVHDQKALKFLVDIIGEDRVVLGSDYPFPLGEHFPGKLIESIEEWDTSLKDKLLSKNAFEFLGLDPSQYET

SEQ ID NO: 67 - protein, 341 aa, Amblyomma maculatum
MASSFSAAANLKIDLHAHVTPDRWPNLRERYGYGGWLDIKHESDKTAVMSYDDGRFFRRIESNCWNIDERIADMDRTGVTVQALSTTPVLFSYWAKPEDALDFSRLQNDFVASLVNRRPDRFVGMCTVPMQSPQLAAEELKRCVSQLGFRAVIVGSHINEWTLADRALDPFYRTVKELGVSIFVHPWDMPPSTRYNKYWLQWLVGMPAETTAAICEVIFGGLLERFPRLKLCFAHGAGSFPYTVGRIQHGFDVRPDLCAVDNKIPPKGYLGEIYADSLVHNRGSLRLLLDTLGEDRVMLGSDYPYPLGEIDRPGRLIETSGLQNSVKEKLLWKKCCELPRN

SEQ ID NO: 68 - protein, 331 aa, Hoeflea phototrophica
MAIIDAHTHTLCPAVNEKVAGTIKPDSVPYQRDMSPESKEQDHTQFPELKIMFNQVERRLADMARMGIDRQVIAPAPGQQHYWAEPKLLAEISALQNDHVAELVARAPDRFAGIGTLPMTDPDAAVAEITRATRELGLRVFQIDSRVMERELSDASLDPIYAALEAAGAGLMIHPLGFSNGERLTPFFMVNSVAQPLEELLAFNHLVFGGVLDRFPKLKVYIAHGGGFAPFYIGRFDHAWKVRPEVNRLTPSAPSTYLRRIYFDTCVYRTDHIETLVRTVGADRVMLGSDYPFDMGDTDPLGLLNACQGLSDDEKATISSKVAIDFFGLET

SEQ ID NO: 69 - protein, 342 aa, Microbacterium testaceum
MATSTEGQDVTDVHAHLLMPGLHAEVERRVPDEVQAAADLELRRNGLASLQASGRMIGERFPRLTDVRARLAAMDEQGVDRQWVSPSPNHFYPWANEGLATWASGEANRLIAEHVALAPDRLVGLGVVPLQHPHLVVDALDDAVLGRGLAGVEISSFAGDVELSDERLESFWARAAELRAVVFLHPFGCSLDERLDRFYLSNTVGQPTENAVALSHLIFSGVLDRHPGLRLIAAHGGGYLPTAIGRSDRAWRVRPEARGCAHAPSTYLSKLWFDTVVHDERALRWLVEAAGADRVLLGSDFPFDMGLDDPVAFVRGAGLQDAEVSGILGGNAAELLRTRVHA

SEQ ID NO: 70 - protein, 324 aa, Alicyclobacillus acidocaldarius
MAIEPNRAADVHTHFLPTEVLEFLKREPRIQVDLERRAPDKEPFLTVEGRWSFELKRMFVDFEAFASAYRQAGIGLALVSPLPQLFVYHLPAEMGAQVAEVYNDALRDVLAPHRERFRPLATLPLADPTAAARELERRMDEGFVGAIVGPGVGEALIGDEAFWPLWEVADARRAVLFLHPLLHADPRAARLMLPNLVGVPWETTLAAAHLVLSGLLDRYPGARVLLAHGGGFLPYQIGRIEQGYDVWPQVRGRLQDRPTAYLRRMFYDNVLWSDAALRCLIDVVGADRVLAGSDFPFDLSAWPPRPGADVSVLAGGSGREGRLS

SEQ ID NO: 71 - protein, 394 aa, Burkholderia dolosa
MARAGHRAARTRQSRPGDRTMTCSCCMSAGRRRVLGAFAALAGAPKGPRAASAAQPAAASKPTRGDATARNRHSRALLPGKASASWSATKASGSGGAFAWDDTTFTFRTPAGGLGPLPMKFIDVDARLRDMDASGVDVQALSLSVPMAYWGDRPFNAKLARAWNTAASRVHVRAPDRFVVLATLPMLDATDAIDELERASELPGVRGVYMGTNIDNRDLDDPRFAPVFARIEQLGLPVFLHPQQTVGGARLGDFYLSNLLGNPFDTAIAASHLILGGVLDRHPALHFTLPHAGGALPILVGRLDAGWTVRAETRRLAHQPSGYLRRFSYDTVSHSGPVLNFLIENVGIDRLVLGSDYCFDMGYEQPVRFLDRLDLTPDERAMVIGGNAGRLLRI

SEQ ID NO: 72 - protein, 372 aa, Cupriavidus necator
MADCPCCVSPKRRRLLGSVSAIAAGMMAGLPALAAQPSTAAAGTGKPLSIDIHAHYYSESFLGLLGGEGKQFGGHFFRNDDSFTFQTPAGGLGPLPMKFIDVEQRVRDMDNSGVDVQAISLSVPMVYWADRTLNAKLARAWNTAASDVHRKHPTRFVVLATLPMLNANDAIDELEFAAGLPGVRGIYMGTNINNRDLDDPLFSPIFKRIEQLNLPIFLHPQQTVGGARLADFYLSNLLGNPFDTAIAASHLILGGVLDKYPALHFSLPHAGGALPILVGRIDAGWSMRSETKRVAQKPSSYLRRFSYDTISHSGPTLDFLIRNIGADRLVLGSDYCFDMGYEQPVRFLDRLALPDDQKRMVVGGNAARLLNL

SEQ ID NO: 73 - protein, 327 aa, Sphaerobacter thermophilus
MARIDAHAHAQPPEYLDALLASGRYESVRDAEGRIVVRERGSRFLTITPQMHHPEQRVAEMDEAGIDMQILSVTTPQVYFLQGQAAVDLARRCNDYLADIVRSYPTRFRALASVPLTADPDAAVREFVRCLDDLGMVGAIIGSNIDGRPIDDPAFDAFYAEADRRATTLFIHPMVPAGIEVMNPYALAPLVGFMFDTTLAVSRLIFSGFFERYPRVKVLVGHLGAAVPYLAGRLDIGWRSYSDCQGIPHPPTEYIRRLYLDTVSFHAPALRCALETVGPDRIVFGSDYPHVIGDVGGAIASIQQALPATTHDGVLGHTAAELFGVSA

SEQ ID NO: 74 - protein, 447 aa, Ramlibacter tataouinensis
MATVIDVHTHMFTTKWLELLKKEGGQYNIQTRPDGQQEIFRGNTPVVIPQKGHFDWKLRIQHMDQAGIDVSVVSLTCPNVYWGGEDVSVRAAREANDNVAQAQTAYPDRIRWFASLPWEYMATVIDVHTHMFTTKWLELLKKEGGQYNIQTRPDGQQEIFRGNTPVVIPQKGHFDWKLRIQHMDQAGIDVSVVSLTCPNVYWGGEDVSVRAAREANDNVAQAQTAYPDRIRWFASLPWEYPQRAVEELERSCAQGAAGVMVLANVAGRSLTDPLFAPVWAEIDRRALPVLVHPTDPPGVDLMDMTKFDLSWSVGFMFDTTLAITRMIFEGFFDRYPNLRIIASHGGGTLPYLVGRFEKGDEVELASRRQMKRKPTDYLRHIHYDCITYNLGALQYLISVVGAGQVMFGTDWPHWVHDTRGAFANTAQLPQEQTRAVRGANAQRLFKL

SEQ ID NO: 75 - protein, 355 aa, Ectocarpus siliculosus
MAKIDSYTHFACPAFMDHLEAESGHPMVFRGLFSSIPELSDIDLRIRYMDEHGIDVHCLVPLPWLECEPGLHADEGKALEACRIANDEMARVVARFPDRLIGVALIPTTTEQAMIQETTRAVKELGMAGVALFVGPTAKPPDMACFEGLYRTCEELGAVVWMHPCRPQSYADYDSYKGEGSKHQIWNTFGWIYDTSVAMVHIALAGVFRRYPGLKVVTHHHGAMVPFFTARFDTQRRNFQEVEGDDLLEDLRLFYCDTATFGESAANIQQAIDFFGKSQVLFGTDTPMDMGTRGMFTRTTIASVEALGAAPEDKESFYAGNVLDMLGERFAGISGARGAVAARPKGDSTRIAASL

SEQ ID NO: 76 - protein, 339 aa, Polymorphum gilvum
MAKKIDIFNHIWPEPFFKALIAHIGEMTDITMRSGAVPMMTNLDRRFEVMDMFGPDYMQVLSLASPPLEKLADPAKALELSRIGSDSLAELCQRYPERFPAFIGTAPLSNPAAVVGECRRAIEDLGAAGMQIFTNVAGKPLDLAEFEPFFEYMASAGKPVWLHPARGEAFADYQTEKRSEYEIWWTFGWPYETSAAMARLVFSRMFDKYPGLKVITHHAGGMVPFFEGRVGPGWDQMGARTTDRDLAAVRKALKRPHLDYFKEFYADTASFGSRKAIEHAIEFFGEDRVLFASDAPFDPEGGPMYIRETMRCIDSLDLTDAQRRKIYHGNATALLGLSL

SEQ ID NO: 77 - protein, 362 aa, Burkholderia xenovorans
MALIDLHAHAPHPGYYNQHPHWGPFFERHEDGDVKLRVGDWILTLGSPERKALVRAGKGPTVEEYQARWADPKVRLAGMDAAGQNAQVVSVPSHCYMYWAEKEFSVPFATKVNDTFAEYCSAAPDRLMFWAHAALNAPEQAALELRRACTELGAKGLVAGGANFGGLEFDSPELDPVWKVLCDLDLPMFIHGYNQSVTWGKKANDDRYETTAIVGMQYDETRCFWNLVCGGVLDRFPGLKVYITHGGGYVPYQLGRLAQCNGNLDVAHNKKPVLEYLKNNFYFDVELHEVPMRQALIDIIGADRVLYGSNFGGSDAVRHDLTEGLRLSDDDLQKIRWKNACKLLHLDPAKIGEPAKKQAVSA

SEQ ID NO: 78 - protein, 359 aa, Marinobacter adhaerens
MALIDLHAHAPHPDYYDQHPHWGPAFELQSDGDIKLRVGHWVLSLGAPERKQALREAHARGETLDVQEYMAKWRDPEHRLASMDAAGQNAQVLSVPSHCYMYWAEPEFGVPFAKKVNDSLAEYCSAAPDRLMFWAHAPLNVPKEAAKEIRRACTELGAKGLVAGGSNFGGLEFDSPEMDPVWEALCDLDLPMFVHGYNQSVTWGEEANTDRYETTAIVGMNYDESKCFWYMINGGVFDRFPNLKVYITHGGGFVPYQLGRMAQTNPNLDTYHNKKPFLEYLKNFYFDVELHEVPMRQAMVEVIGADRVLYGSNFGGSDAVRHDLTDDLKLSQEDLDKIRWKNACDLLHLDPNKLGKVRG

SEQ ID NO: 79 - protein, 343 aa, Pyrenophora teres
MATTTTPSTLIATLESHLTPTLAFTSPTTSPTQPALHLIPPTTLTKLRNLGPGRVKDMHMLGHSRQIISHIPVAAPPQICSRFNDAIHAATMTNTAKFSVLAVLPTDGMEAAKELARCVSKYRFVGGVIGLNRGLRINGEGWEELWGLAERLRIPIMFREMWPLAFEIVDYQHHLPYSALGPILTQLHTSHTSSPLPLVRLYLSSVFDHYPSLRLVLAHPGSLPSLVPRIESLINSIPATDKPKRSFLDVWQHNIYLTTADAQDMSSLRALLEQIPVDRVLYASNYPFEERGNELMNELRESEFLTNIEWERVAWVNAETLFNLKEAGTKEARQLTTIPSSRS

SEQ ID NO: 80 - protein, 377 aa, Cordyceps militaris
MAAASTPVVVDIHTHMYPPSYIAMLEKRQTIPLVRTFPQADEPRLILLSSELAALDAALADPAAKLPGRPLSTHFASLAQKMHFMDTNGIRVSVISLANPWFDFLAPDEAPGIADAVNAEFSDMCAQHVGRLFFFAALPLSAPVDAVKASIERVKNLKYCRGIILGTSGLGKGLDDPHLLPVFEAVADAKLLVFLHPHYGLPNEVYGPRSEEYGHVLPLALGFPMETTIAVARMYMAGVFDHVRNLQMLLAHSGGTLPFLAGRIESCIVHDGHLVKTGKVPKDRRTIWTVLKEQIYLDAVIYSEVGLQAAIASSGADRLMFGTDHPFFPPIEEDVQGPWDSSRLNAQAVIKAVGEGSSDAAAVMGLNAVRVLSLKAE

SEQ ID NO: 81 - protein, 380 aa, Verticillium dahliae
MAASTKPKVVDIHTHMYPPSYIDILTSRTAIPVVRTFPQAADPRLILLDAEQQALDAALQDPTAKPPGRPLTSHYASLDQKIHFMDTHSIDISVVSLANPWLDFIEPKEAAATARSVNDEFEAMCASQPGRLFFFAALPLTAPLPALLEAVRHVAELEHCRGVILGTSGLGSGLDDPELVPVLEAVAAAALTVFLHPHYGLPNDVWGPRASAEYGHVLPLALGFPMETTIAVARMYLAGVFDRVPALRMLLAHSGGTLPFLAGRIESCILHDGQLVAEGKVGAARRTIWDVLREQVYLDAVIYSEIGLKAAIAASGGADRLMFGTDHPFFPPLGTDEQAKKESRINAGGSRPMITGNAMINGHGGLCNHITQSDYQDVVL

SEQ ID NO: 82 - protein, 318 aa, Rhodopseudomonas palustris
MAQNETPVIAIEEHYWDPEMVARFPAGENASPFSTLLTELGDVRLRAMDEAGIDVQVLSHGAPAAQKLPPDVAPELTRRVNDRLAEACARFPNRFAAFAALPTPAPEAAARELERCVRDLGFKGAMIHGLTNGLFIDDKRFWPIFEVAEKLDVPIYLHPSVPHADVTRYYYDDYAREFPTVIRPAWGFTVETATQAIRLILSRALESYPRLQIILGHLGETLPFLLWRINQALARPGQTPLDFRKQFCDHFHVTTSGFFSTPALICTMLELGIDRIMFAVDYPYVVNRDGTDWVQQLQISPDDKRKLVGGNARRLLKL

SEQ ID NO: 83 - protein, 326 aa, Mycobacterium rhodesiae
MALIALEEHYAWSPVSAGNVVGSWLETHNVTAYQRLYDRGPLRLEQMDAAGIDFQILSLFDPGVQDDDDTARAVENARRANDDLAETVRAAPDRFGGFATLAPQDPDAAAAELERAVGELGLVGGLINGHTHGRYLDDPAYLGLFECAQRLGVPIYLHPTTPHPAVMDAWFAPYVKDGLHLASWGFAAETGTHALRLIYSGLFDTFPRLQMILGHLGEMLPYAAYRIDRYYGLGGGDDGGRLARLPSEYLRDNFHVTTSGNFNPVAFACALDVMGPDRLMFSVDYPMDDNVTGAEFLRNLEVDDDVRRKVAGENALQLFGDKIPRR

SEQ ID NO: 84 - protein, 330 aa, Mycobacterium rhodesiae
MASLIALEEHYAWDPASEGNVVATWLRANNGVAYDRLYDRGPLRIEQMDAAGIDFQILSLFDPGVQDEVDAVRAVDLARRANDDLAESVRANPSRFGGFATLATQQPDAAVAEFDRAVTELGLVGGLINGHCQGRYLDDPAYEALFSRAEALGAPIYLHPTTPHPAVMDAWFAPYVGDGLHLASWGFAAETGTHVLRLIYSGLFDKFPRLQMIIGHLGEMLPFAAYRIDRYYGLGGGGTGHTLQHLPSDYLRNNFHVTTSGNFCSPALDCTLDVMGADRVMFSVDYPMDDNQTGADFLASYPMDDTNRRKVASENALRLFGDRIPAALRN

SEQ ID NO: 85 - protein, 329 aa, Maritimibacter alkaliphilus
MAADRKPGLVSVEEGFMIPEVVAELSRIAGGVPSMKSGPIAGPFMDDLLDIGKGRVARMDADGVAVQILALAAPGVQKFDPDTALALSRLTNDRLAEAIAAHPARFGGLAAAPPQAAREGAKELDRAITTLGLNGLIVNSHTNDLYLDDPSFWPLLEAAEALDVPVYLHPREPAAGIEGGLMAMTGFTVGWAYAVETGTHLLRMIAAGVFDRFPRLRIVLGHLGEMIPFMLDRIDNRYPFEMGVTGAKPLPRKPSDYFRDHVTVATSGMNFNAPMRAAIEVLGADKVMFAADYPMERQDEEVAKFAALDLTPDERKRIGEDNARRVFGL

SEQ ID NO: 86 - protein, 359 aa, Sphingopyxis alaskensis
MALGASVASREASAQMAKAPMRKIATEEAFATPELAKAWLEIARSEPNSSLDIPTGILSIFDNPRPGSNQDRFRRQLLDVDAERIRDMDEAGVDMQLLSVTIPGVQIFEPARAGELAVTTNDHLAAAIARRPTRFAGLACFAPHDPVQATREMERAVNALGLKGFIVNSHTQDLYLDDPRFAPVLEAAQSLDCPIYLHPRAPSNGMAAPFRDYSMGGSIWGFGVEAGTHAVRMILSGVFDRYPRLRIVLGHMGEALPFWMWRLDHMAARRAKDGRMKPLSLAPSEYFKRNFAVTTSGFESPDVLDLVIKVAGIENIMWAIDYPYESSRDAVTFIEGADLTASQRASIFHRNAVRHFRLS

SEQ ID NO: 87 - protein, 357 aa, Novosphingobium sp.
MASDIATAADLQTGGRQGYLRIATEEAFATRDQIDVYLRMVRDGTADRGMTSLWGFYAQSPSARATQIIERLLDLGEQRLADMDAAGIDKAVLALTSPGVQPLLDMEEARRIAGNANDRLAERCAAHPDRFIGMTAVAPQDPQWSAREILRGATQLGFKGVQINSHTQGRYLDEPFFDPIFRALGDVGQPLYIHPGTPPDSMIGPLLDAGLDGAIYGFGVETGMHLLRLITAGIFDRYPDLQIMVGHMGEALPYWLYRLDYMHQAGIRSQRYERMRPLKRTIAGYFRSNVLVTCSGMAWEPAIQFARQVMGEDRVMYAMDYPYQYEADEVRALDVMDLSPESKRKFFQTNAERWFDL

SEQ ID NO: 88 - protein, 318 aa, Starkeya novella; identical to SEQ ID NO: 10

SEQ ID NO: 89 - protein, 361 aa, Erwinia billingiae
MATNRRDFLKNATAVMAGSTVFAGSSHFASAAAVEPAAVQPPRRIIALEEHFMLPEFVGYLHETQQNLRNGLVDKVVTPLSDFGKGRLEIMDKNGVDFAVLSLSGPGVQAEPDRVKAVRLARYANDKLATEMQKNPRRYGGFAHLAMQDPLAAANELERCVKQLHMQGGMINGETDGLYLDDRRYDVFWERVEALNVPIYIHPGNPPDYPHMFAGHPEMWGPVWSWAVETCSHALRLIFSGTFDRYPGARVILGHMGETLPIQLWRLDSRYQIANQTFAIKHPPSWYAKKNITITTSGVCNDAALRCALDSMGSENVMFSIDYPFESTEIAVNWLKTANITEQERNAVAWGNATSILRLGA

SEQ ID NO: 90 - protein, 388 aa, Pyrenophora tritici-repentis
MAATIDRVLYLGNATQRRYTSATVSVPRIFGKVALEEHVGTSIWAKYNLTPPANAVVGVLNRPPTLPNTLDTIARLDDINGRLSSMNHSGIGYVIVSLSSPGIQGVHDTALAIKFSTDINDELYLKYANAYPDKFAFFATVPMQDPVAAASELERAVSLLGAKGAAINGYTDIGPPGNSTTRYLDDPINAPFWSKVAALNVPIYLHPRAPPPSQQLVYNYPNNSLSAYPGLVTGGFAYGAETAVHALRLMLSGLFDTHPNIQIILGHAAEGLPFLIHRSDTQLAAEVPGTNGPYKRPLRYYLRNNFYATLSGVRRLSTTQCTLAEMGEERVLFSVDYPFQSNEDAADWFDGVEGMSVETKRKVARGNARRLFNLTVDLDERQIDGDFM

SEQ ID NO: 91 - protein, 421 aa, Botryotinia fuckeliana
MASFVCNFGKAALATLLLTPSISAADYTPQETVLNSGRPTFYDASTSIPGKIALEEHVGNDLLNGLYTVPYYPNTNEPQYSDSVYIADVGEKMLDIPSRIANMDAANISISVLTFGGPGIQGVFNATYATYAAGYVNDYLYKNYKNNANYTGRFEFWCSNALQEPSKAATELERCVKELGGVGSFVGGYTNNGGINGTANDIVYLDDPSMEPFLEKVVELDVPIYLHPRMPAPSQLLSVKGYEFLGSSPWGFSSETGAHALRLMVSGTLDKYPTLKIVLGHCGEGLPFFLPRIDQRLRHFKKELFNNTLTMEEYWLRNFYVTTAGVQDAGTLVDTIKRTGEDRVMFSVDYPFEDTVEIAGWFDRLEMNTLTKTKLAYENAKALLKLTCYVDAEKRPRIFNKHHVDDIIKHTHSPCIWTLFH

SEQ ID NO: 92 - protein, 327 aa, Chitinophaga pinensis
MARIVTLEEHVSFPEMTALLPEEILKNRKQSGAALQMQEKLADITGERLTSMKAAGISMQVLSVENTDVYLLPDSLAPAFAAKYNDLLADKISSHSDAFAAFAMLPMTVPEAAADELERAVKTHGFCGAMIKGLINGVFLDAPKFAPVFACAEKLGVPLYIHPGIPPKEVIDAYYSNVGDTKGPNEAIACYGWGWHSETAIHILRLLAAGIFDKYPQLNIIIGHMGEMLPMMWERSNRVFQPGNNGKNQRTLIETFRKQLYITTSGIFTQPPLQIAIDTIGIDNILFSIDYPFSSNQMGIDFLTKAALPAEQLAKMAHGNADRILKF

SEQ ID NO: 93 - protein, 341 aa, Mucilaginibacter paludis
MAKYGKHITINKNMRIVTLEEHISFPEMADQIPKAALGSFGRSEAMQRIAPKLADITGERLKSMDANGISMQVLSVDSSGVNLLSPQQGPAFATQYNDLIANRIAGFEKRFTAFAHLPMTAPFAAADELERAVKEHHFCGAMIRGLTGDQFLDHPQFAPIFERAQKLDVPIYLHPGLPPKGVADIYYSGLPNYSGMAEALACYGWGWHSETALHVLRLLFSGIFDQYPKLKLVIGHMGEMLPMMMARSEKAFKPGNGGANVRTLTDTFRSQVYLTTSGFFTQPPLKIALDTFGIDHVMFSVDYPFSTNEMGIEFLNEIDLPDEEVARIAHGNADKLLNLKA

SEQ ID NO: 94 - protein, 169 aa, Bacillus thuringiensis
MANRGDSNMKSLVGVIMGSTSDWETMKYACDILDELNIPYEKKVVSAHRTPDYMFEYAETARERGLKVIIAGAGGAAHLPGMVAAKTNLPVIGVPVQSKALNGLDSLLSIVQMPGGVPVATVAIGKAGSTNAGLLAAQILGSFHDDIHDALELRREAIEKDVREGSELV

SEQ ID NO: 95 - protein, 335 aa, Pseudomonas fluorescens
MAKKPRIDMHSHFFPRISEQEAAKFDANHAPWLQVSAKGDTGSIMMGKNNFRPVYQALWDPAFRIEEMDAQGVDVQVTCATPVMFGYTWEANKAAQWAERMNDFALEFAAHNPQRIKVLAQVPLQDLDLACKEASRAVAAGHLGIQIGNHLGDKDLDDATLEAFLTHCANEDIPILVHPWDMMGGQRMKKWMLPWLVAMPAETQLAILSLILSGAFERIPKSLKICFGHGGGSFAFLLGRVDNAWRHRDIVREDCPRPPSEYVDRFFVDSAVFNPGALELLVSVMGEDRVMLGSDYPFPLGEQKIGGLVLSSNLGESAKDKIISGNASKFFNINV

SEQ ID NO: 96 - protein, 382 aa, Aspergillus nidulans
MAPLIVDVHTHVYPPAYMQMLRSRKTVPYVHDPSNNRDPRLIILSSDDDASIPLDQRGRPVDSSYWDINVKLSFMRQHGINCSVISLANPWLDFVEPAEAQMWAERINDDLEKTCATVNKAADPGNTLTLDQKETLFAFGALPLSAPSSESVVAEIKRLKTLEHLRGVIMGTSGLGKGLDDARLDPVWEALQETDMLMFLHPHYGLPEEAYGGPETTGRYGHVLPLALGFPLETTIAVTRMLLSGVFDRFPRLKILLAHSGGTLPFLAGRIESCILHERKFISGGGDVQGPQRSVWDVLKTNIYLDAVVYGKPGLEAAMTASGSDRLLFGTDHPFFPPLDSKDNSWPSVTTNYQAIHATFDTNSKTVADVLGGNAARILNLK

SEQ ID NO: 97 - protein, 342 aa, Sphingobium sp.
MAMMIIDCHGHYTVLPKAHDEWREQQKAAFKAGQPAPPYPEISDDEIRETIEANQLRLIKERGADMTIFSPRASAMAPHVGDQSVAVPWAQACNNLIARVVDLFPETFAGVCMLPQSPEADMTSSIAELERCVNELGFIGCNLNPDPGGGHFKHPPLTDRFWYPFYEKMVELDVPAMIHVSGSCNPAMHATGAYYLAADTIAFMQLLQGNLFADFPTLRFIIPHGGGAVPYHWGRFRGLADMLKQPSLDTLLMNNVFFDTCVYHQPGINLLADVIDNKNILFGSEMVGAVRGIDPTTGHYFDDTKRYIDALDISDQERHAIFEGNTRRVFPRLDAKLKARGL

SEQ ID NO: 98 - protein, 341 aa, Xanthomonas campestris pv.
MAIIDCHGHYTTAPAAHDAFRKAQIAHHDDPQQPAPQYPHISDDALRESIEQHQLRLLRERGADMTIFSPRASTMAHHIGNEAVSQVWTQRCNDLIARVVQLYPHTFIGVCQLPQSPGVPISHSIAELERCVNELGFVGCNLNPDPSGGHWNGVPLTDRAWYPFFEKMVELDVPAMVHVSGSCNANFHATGAHYLNADTTAFMQFLEGDLFRDFPSLRFIIPHGGGAVPYHWGRFRGLADMLGKPPLATHVMRNVFFDTCVYHQPGIDLLFEVIDIDNILFGSEMVGAVRGIDPQTGHYFDDTKRYIDALTISDADKRKVFEGNARRVYPRLDAQLRARGL

SEQ ID NO: 99 - protein, 343 aa, Ralstonia solanacearum
MAIIDCHGHFTTAPTALEDWRKRQIANLATPALGPSPDDLKISDDALTEAIRANQLRLMQARGSDLTIFSPRASFMAHHIGDFHTSATWAAICNALCHRVSQLFPDHFVGAAMLPQSPGVDIRTCIPELARCIVDYGFVGVNLNPDPSGGHWTSPPLSDPYWFPLYEKLVEYDVPAMIHVSTSCNACFHTTGAHYLNADTTAFMQVLTSDLFRRFPTLKFVIPHGGGAVPYHWGRFRGLAQELKTPPLQEHLLHNVFFDTCVYHQPGIDLLTRVIPVDNILFASEMIGAVRGIDPETGHPFDDTRRYIDQAHTLSAEDRHKIYEGNARRVYPRLDARLKARGR

SEQ ID NO: 100 - protein, 338 aa, Reinekea blandensis
MAIIDCHGHYTTTPKGVEDYRNAQKAAVAKDPSFKGEKGQVVVSDDEIRESIENNQLKMQRERGTDLTIFSPRASWMGHHIGNEYTSQFWTEHQNDLIRRVCDLFPKNFAPVAQLPQSPGVDPAKSVPEIVRTVEQMGFIGINLNPDPSGGYWKDTSLADRAFYPIYEKMVEYDIPAMIHVSAACNDCFHTTGSHYLGADTTGFQQLIMSDVFKDFPSLKIIIPHGGGAVPYHWGRFRGLMQDQGYAPLEESALKNIYFDTCVYHQRGIDLLLDIVPTQNILFASEMIGAVRGIDPETGHNFDDTKRYIDNNTALNAEEKAMIFEGNARRVFSRLKTD

SEQ ID NO: 101 - protein, 190 aa, Aquifex aeolicus
MAQKIALCITGASGVIYGIKLLQVLEELDFSVDLVISRNAKVVLKEEHSLTFEEVLKGLKNVRIHEENDFTSPLASGSRLVHYRGVYVVPCSTNTLSCIANGINKNLIHRVGEVALKERVPLVLLVREAPYNEIHLENMLKITRMGGVVVPASPAFYHKPQSIDDMINFVVGKLLDVLRIEHNLYKRWRG

SEQ ID NO: 102 - protein, 179 aa, Lactobacillus plantarum
MATKTFKTLDDFLGTHFIYTYDNGWEYEWYAKNDHTVDYRIHGGMVAGRWVTDQKADIVMLTEGIYKISWTEPTGTDVALDFMPNEKKLHGTIFFPKWVEEHPEITVTYQNEHIDLMEQSREKYATYPKLVVPEFANITYMGDAGQNNEDVISEAPYKEMPNDIRNGKYFDQNYHRLNK

SEQ ID NO: 103 - protein, 365 aa, Plasmodium yoelii yoelii
MAMEIPTEEIKFLKKEDVQNIDLNGMSKKERYEIWRRIPKVELHCHLDLTFSAEFFLKWARKYNLQPNMSDDEILDHYLFTKEGKSLAEFIRKAISVSDLYRDYDFIEDLAKWAVIEKYKEGVVLMEFRYSPTFVSSSYGLDVELIHKAFIKGIKNATELLNNKIHVALICISDTGHAAASIKHSGDFAIKHKHDFVGFDHGGREIDLKDHKDVYHSVRDHGLHLTVHAGEDATLPNLNTLYTAINILNVERIGHGIRVSESDELIELVKKKDILLEVCPISNLLLNNVKSMDTHPIRKLYDAGVKVSVNSDDPGMFLSNINDNYEKLYIHLNFTLEEFMIMNNWAFEKSFVSDDVKSELKALYF

SEQ ID NO: 104 - protein, 364 aa, Plasmodium Vivax
MANILQEPIDFLKKEELKNIDLSQMSKKERYKIWKRIPKCELHCHLDLCFSADFFVSCIRKYNLQPNLSDEEVLDYYLFAKGGKSLGEFVEKAIKVADIFHDYEVIEDLAKHAVFNKYKEGVVLMEFRYSPTFVAFKYNLDIELIHQAIVKGIKEVVELLDHKIHVALMCIGDTGHEAANIKASADFCLKHKADFVGFDHGGHEVDLKEYKEIFDYVRESGVPLSVHAGEDVTLPNLNTLYSAIQVLKVERIGHGIRVAESQELIDMVKEKNILLEVCPISNVLLKNAKSMDTHPIRQLYDAGVKVSVNSDDPGMFLTNINDDYEELYTHLNFTLEDFMKMNEWALEKSFMDSNIKDKIKNLYF

SEQ ID NO: 105 - protein, 245 aa, Deinococcus radiodurans
MAIDFHVHLDLYPDPVAVARACEERQLTVLSVTTTPAAWRGTLALAAGRPHVWTALGFHPEVVSERAADLPWFDRYLPETRFVGEVGLDGSPSLRGTWTQQFAVFQHILRRCEDHGGRILSIHSRRAESEVLNCLEANPRSGTPILHWYSGSVTELRRAISLGCWFSVGPTMVRTQKGAALIRSMPRDRVLTETDGPFLELDGQAALPWDVKSVVEGLSKIWQIPASEVERIVKENVSRLLGTVR

SEQ ID NO: 106 - protein, 495 aa, Pyrococcus horikoshii
MAGMKFIKNLHVSKLVIDSMKALINGTIYTSFNPLKKVSGLVISHGKVIYAGDSEVAKKIVELSGGEIVDLKGKYVMPAFFDSHLHLDELGMSLEMVDLRGAKSIEELIQRLKRGKGRIIFGFGWDQDELGEWPTRKELNAIDKPVFIYRKCFHVAVANDKMLELLNLTPSKDFDEDTGIIKEKSLEEARKVINERVLTVEDYVYYIKRAQEHLLDLGVKSVSFMSVNEKALRALFYLEREGKLSINVFAYVTPEVLDKLESIGLGRFQGNRLTIAGVKLFTDGSLGARTALLSKPYSDDPSTSGQLVMEREELIRITEKARSLGLDVAIHAIGDKALDVALDVFETTGFPGRIEHASLVRDDQLERVKNLKVRLSVQPHFIISDWWIVERVGEERVKWVYRFKDLMKVAELGFSTDSPIEPADPWLTVDAAVNRGKGKVKLYELTKDQALDIKDALHSYTYGSARVSLASDIGKLEPGFKAEYIILDRDPLVVK

SEQ ID NO: 107 - protein, 343 aa, Rhodopseudomonas palustris
MAIIDIHGHYTTAPKALEDWRNRQIAGIKDPSVMPKVSELKISDDELQASIIENQLKKMQERGSDLTVFSPRASFMAHHIGDFNVSSTWAAICNELCYRVSQLFPDNFIGAAMLPQSPGVDPKTCIPELEKCVKEYGFVAINLNPDPSGGHWTSPPLTDRIWYPIYEKMVELEIPAMIHVSTSCNTCFHTTGAHYLNADTTAFMQCVAGDLFKDFPELKFVIPHGGGAVPYHWGRFRGLAQEMKKPLLEDHVLNNIFFDTCVYHQPGIDLLNTVIPVDNVLFASEMIGAVRGIDPRTGFYYDDTKRYIEASTILTPEEKQQIYEGNARRVYPRLDAALKAKGK

SEQ ID NO: 108 - protein, 337 aa, Staphylococcus aureus
MAKSITFEEHYVIEDIQKETMNAISADPKGVPMKVMLEGLEKKTGFTNADELSHHDERIQFMNNQDVQIQVLSYGNGSPSNLVGQKAIELCQKANDQLANYIAQYPNRFVGFATLPINEPEAAAREFERCINDLGFKGALIMGRAQDGFLDQDKYDIIFKTAENLDVPIYLHPAPVNSDIYQSYYKGNYPEVTAATFACFGYGWHIDVGIHAIHLVLSGIFDRYPKLNMIIGHWGEFIPFFLERMDEALFAEHLNHSVSYYFKNSFYITPSGMLTKPQFDLVKKEVGIDRILYAADYPYIEPEKLGVFLDELGLTDEEKEKISYTNGAKLLGLSSNN

SEQ ID NO: 109 - protein, 328 aa, Artificial Sequence
  synthetic construct; Dicamba decarboxylase variant clone: DC.4.032
MAQGKVALEEHFAIPETLQDSAGFVPGDYWKELQHRLLDIQDTRLKLMDAHGIETMILSLNAPAVQAIPDRRKAIEIARRANDVLAEECAKRPDRFLAFAALPLQDPDAATEELQRCVNDLGFVGALVNGFSQEGDGQTPLYYDLPQYRPFWGEVEKLDVPFYLHPRNPLPQDSRIYDGHPWLLGPTWAFAQETAVHALRLMASGLFDEHPRLNIILGHMGEGLPYMMWRIDHRVAWVKLPPRYPAKRRFMDYFNENFHITTSGNFRTQTLIDAILEIGADRILFSTDWPFENIDHASDWFNATSIAEADRVKIGRTNARRLFKLDGA

SEQ ID NO: 110 - protein, 328 aa, Artificial Sequence
  synthetic construct; Dicamba decarboxylase variant clone: DC.4.111
MAQGKVALEEHFAIPETLQDSMGFVPGDYWKELMHRLLDIQDTRLKLMDAHGIETMILSLNAPAVQAIPDRRKAIEIARRANDVLAEECAKRPDRFLAFAALPLQDPDAATEELQRCVNDLGFVGALVNGFSQEGDGQTPLYYDLPQYRPFWGEVEKLDVPFYLHPRNPLPQDSRIYDGHPWLLGPTWAFAQETAVHALRLMASGLFDEHPRLNIILGHMGEGLPYMMWRIDHRMAWVKLPPRYPAKRRFMDYFNENFHITTSGNFRTQTLIDAILEIGADRILFSTDWPFENIDHASDWFNATSIAEADRVKIGRTNARRLFKLDGA

SEQ ID NO: 111 - protein, 328 aa, Artificial Sequence
  synthetic construct; Dicamba decarboxylase variant clone: DC.4.112
MAQGKVALEEHFAIPETLQDSMGFVPGDYWKELMHRLLDIQDTRLKLMDAHGIETMILSLNAPAVQAIPDRRKAIEIARRANDVLAEECAKRPDRFLAFAALPLQDPDAATEELQRCVNDLGFVGALVNGFSQEGDGQTPLYYDLPQYRPFWGEVEKLDVPFYLHPRNPLPQDSRIYDGHPWLLGPTWAFAQETAVHALRLMASGLFDEHPRLNIILGHMGEGLPYMMWRIDHRMAWIKLPPRYPAKRRFMDYFNENFHITTSGNFRTQTLIDAILEIGADRILFSTDWPFENIDHASDWFNATSIAEADRVKIGRTNARRLFKLDGA

SEQ ID NO: 112 - protein, 328 aa, Artificial Sequence
  synthetic construct; Dicamba decarboxylase variant clone: DC.4.113
MAQGKVALEEHFAIPETLQDSAGFVPGDYWKELVHRLLDIQDTRLKLMDAHGIETMILSLNAPAVQAIPDRRKAIEIARRANDVLAEECAKRPDRFLAFAALPLQDPDAATEELQRCVNDLGFVGALVNGFSQEGDGQTPLYYDLPQYRPFWGEVEKLDVPFYLHPRNPLPQDSRIYDGHPWLLGPTWAFAQETAVHALRLMASGLFDEHPRLNIILGHMGEGLPYMMWRIDHRVAWVKLPPRYPAKRRFMDYFNENFHITTSGNFRTQTLIDAILEIGADRILFSTDWPFENIDHASDWFNATSIAEADRVKIGRTNARRLFKLDGA

SEQ ID NO: 113 - protein, 328 aa, Artificial Sequence
  synthetic construct; Dicamba decarboxylase variant clone: DC.4.114
MAQGKVALEEHFAIPETLQDSAGFVPGDYLKELFHRLLDIQDTRLKLMDAHGIETMILSLNAPAVQAIPDRRKAIEIARRANDVLAEECAKRPDRFLAFAALPLQDPDAATEELQRCVNDLGFVGALVNGFSQEGDGQTPLYYDLPQYRPFWGEVEKLDVPFYLHPRNPLPQDSRIYDGHPWLLGPTWAFAQETAVHALRLMASGLFDEHPRLNIILGHMGEGLPYMMWRIDHRVAWVKLPPRYPAKRRFMDYFNENFHITTSGNFRTQTLIDAILEIGADRILFSTDWPFENIDHASDWFNATSIAEADRVKIGRTNARRLFKLDGA

SEQ ID NO: 114 - protein, 328 aa, Artificial Sequence
  synthetic construct; Dicamba decarboxylase variant clone: DC.4.116
MAQGKVALEEHFAIPETLQDSAGAVPGDYWKELQHRLLDIQDTRLKLMDAHGIETMILSLNAPAVQAIPDRRKAIEIARRANDVLAEECAKRPDRFLAFAALPLQDPDAATEELQRCVNDLGFVGALVNGFSQEGDGQTPLYYDLPQYRPFWGEVEKLDVPFYLHPRNPLPQDSRIYDGHPWLLGPTWAFAQETAVHALRLMASGLFDEHPRLNIILGHMGEGLPYMMWRIDHRVAWVKLPPRYPAKRRFMDYFNENFHITTSGNFRTQTLIDAILEIGADRILFSTDWPFENIDHASDWFNATSIAEADRVKIGRTNARRLFKLDGA

SEQ ID NO: 115 - protein, 326 aa, Artificial Sequence
  synthetic construct; Dicamba decarboxylase variant clone: DC.4.161
MAQGKVALEEHFAIPDTLTTYTTSGDYEKELKHRLLDIQDTRLKLMDAHGIETMILSLNAPGVQAIPDRRKAIEIARRANDVLAEECAKRPDRFLAFAALPLQDPDAATEELQRCVNDLGFVGALVNGFSQEGDGQTPLYYDLPQYRPFWGEVEKLDVPFYLHPRNPLPQDSRIYDGHPWLLGPTWAFAQETAVHALRLMASGLFDEHPRLNIILGHMGEGLPYMMWRIDHRNAWVKTPPRYPAKRRFMDYFNENFHITTSGNFRTQTLIDAILEIGADRILFSTDWPFENIDHASDWFNATSIAEADRVKIGRTNARRLFKLDGA

SEQ ID NO: 116 - protein, 327 aa, Artificial Sequence
  synthetic construct; Dicamba decarboxylase variant clone: DC.30.007
MAQGKVALEEHFAIPETLQDAAGFVPGDYWKELQHRLLDIQDRRVRLMDEHGIETMILSLNAPAVQAIADSTRANETARRANDFLAEQVAKQPTRFRGFAALPMQDPELAARELERCVKELGFVGALVNGFSQDNRSAVPLYYDMAQYWPFWETVQALDVPFYLHPRNPLPSDARIYDGHAWLLGPTWAFGQETAVHALRLMGSGLFDKYPALKIILGHMGEGLPYSMWRIDHRNAWIKTTPKYPAKRKIVDYFNENFYLTTSGNFRTQTLIDAILEIGADRILFSTDWPFENIDHAADWFENTSISEADRKKIGWGNAQNLFKLNR

SEQ ID NO: 117 - protein, 335 aa, Artificial Sequence
  synthetic construct; Dicamba decarboxylase variant clone: DC.5.008
MAKKPRIDMHSHFFPRISEQEAAKFDANHAPWLQVSAKGDTGSIMMGKNNFRPVYQALWDPAFRIEEMDAQGVDVQVTCATPVMFGYTWEANKAAQWAERMNDFALEFAAHNPQRIKVLAQVPLQDLDLACKEASRAVAAGHLGIQIGNHLGDKDLDDATLEAFLTHCANEDIPILVHPWDMMGGQRMKKWMLPVLVAAPAEVQLAILSLILSGAFERIPKSLKICFAGGGGSFAFLLGIVDLAWRHRDIVREDCPRPPSEYVDRFFVDSLVFNPGALELLVSVMGEDRVMLGSDYPFPTGEQKIGGLVLSSNLGESAKDKIISGNASKFFNINV

SEQ ID NO: 118 - protein, 334 aa, Artificial Sequence
  synthetic construct; Dicamba decarboxylase variant clone: DC.5.033
MAKKPRIDMHSHFFPRISEQEAAKFDANHAPWLQVSAKGDTGSIMMGKNNFQPVYQALWDPAFRIEEMDAQGVDVQVTCATPVMFGYTWEANKAAQWAERMNDFALEFAAHNPQRIKVLAQVPLQDLDLACKEASRAVAAGHLGIQIGNHLGDKDLDDATLEAFLTHCANEDIPILVHGTDMMGGQRMKKWGLPWLVALAAEVQLAILSLILSGAFERIPKSLKICFSHGGGSFAFLLGLVDEAWRHVDIVREDCPRPPSEYVDRFFVDSVGNPGALELLVSVMGEDRVMLGSDYPHTTGEQKIGGLVLSSNLGESAKDKIISGNASKFFNINV

SEQ ID NO: 119 - protein, 334 aa, Artificial Sequence
  synthetic construct; Dicamba decarboxylase variant clone:DC.5.034
MAKKPRIDMHSHFFPRISEQEAAKFDANHAPWLQVSAKGDTGSIMMGKNNFQPVYQALWDPAFRIEEMDAQGVDVQVTCATPVMFGYTWEANKAAQWAERMNDFALEFAAHNPQRIKVLAQVPLQDLDLACKEASRAVAAGHLGIQIGNHLGDKDLDDATLEAFLTHCANEDIPILVHGWDMMGGQRMKKWGLYWLVAHHAEVQLAILSLILSGAFERIPKSLKICFSHGGGSFAFTLGWVDEAWRHVDIVREDCPRPPSEYVDRFFVDSVGNPGALELLVSVMGEDRVMLGSDYPLTTGEQKIGGLVLSSNLGESAKDKIISGNASKFFNINV

SEQ ID NO: 120 - protein, 338 aa, Artificial Sequence
  synthetic construct; Dicamba decarboxylase variant clone: DC.12.002
MAIIDCHGHYTTTPKGVETYRNAQKAAVAKDPSFKYEKGQVVVSDDEIRESIENNQLKMQRERGTDLTIFSPRSTAGGHHIGNEYTSQFWTEHQNDLIRRVCDLFPKNFAPVAQLPQSPGVDPAKSVPEIVRTVEQMGFIGINLNPDPSGGYWKDTSLADRAFYPIYEKMVEYDIPAMIHPRNACNDCFHTTGSHALGADTTGFQQLIMSDVFKDFPSLKIIIPHGGGAVPYHWGRFRGLMQDQGYAPLEESALKNIYFDTCVYHQRGIDLLLDIVPTQNILFASEMIGAVRGIDAETGHNFDDTKRYIDNNTALNAEEKAMIFEGNARRVFSRLKTD

SEQ ID NO: 121 - protein, 338 aa, Artificial Sequence
  synthetic construct; Dicamba decarboxylase variant clone: DC.12.014
MAIIDCHGHYTTTPKGVEDYRNAQKAAVAKDPSFKGEKGQVVVSDDEIRESIENNQLKMQRERGTDLTIFSPRWDAGGHHIGNEYTSQFWTEHQNDLIRRVCDLFPKNFAPVAQLPQSPGVDPAKSVPEIVRTVEQMGFIGINLNPDPSGGYWKDTSLADRAFYPIYEKMVEYDIPAMIHPRLACNACFHTGLSVGLGADTTGFQQLIMSDVFKDFPSLKIIIPHGGGAVPYHWGRFRGLMQDQGYAPLEESALKNIYFDTCVYHQRGIDLLLDIVPTQNILFASEMIGAVRGIDPETGHNFDDTKRYIDNNTALNAEEKAMIFEGNARRVFSRLKTD

SEQ ID NO: 122 - protein, 338 aa, Artificial Sequence
  synthetic construct; Dicamba decarboxylase variant clone: DC.12.103
MAIIDCHGHYTTTPKGVEDYRNAQKAAVAKDPSFKGEKGQVVVSDDEIRESIENNQLKMQRERGTDLTIFSPRSTAGGHHIGNEYTSQFWTEHQNDLIRRVCDLFPKNFAPVAQLPQSPGVDPAKSVPEIVRTVEQMGFIGINLNPDPSGGYWKDTSLADRAFYPIYEKMVEYDIPAMIHPRNACNDCFHTTGSHALGADTTGFQQLIMSDVFKDFPSLKIIIPHGGGAVPYHWGRFRGLMQDQGYAPLEESALKNIYFDTCVYHQRGIDLLLDIVPTQNILFASDMIGAVRGIDPETGHNFDDTKRYIDNNTALNAEEKAMIFEGNARRVFSRLKTD

SEQ ID NO: 123 - protein, 328 aa, Artificial Sequence
  synthetic construct; Dicamba decarboxylase variant clone: S03902153
MAQGKVALEEHFAIPETLQDSAGFVPGDYWKELQHRLLDIQDTRLKLMDAHGIETMILSLAAPAVQAIPDRRKAIEIARRANDVLAEECAKRPDRFLAFAALPLQDPDAATEELQRCVNDLGFVGALVNGFSQEGDGQTPLYYDLPQYRPFWGEVEKLDVPFYLHPRNPLPQDSRIYDGHPWLLGPTWAFAQETAVHALRLMASGLFDEHPRLNIILGHMGEGLPYMMWRIDHRVAWVKLPPRYPAKRRFMDYFNENFHITTSGNFRTQTLIDAILEIGADRILFSTDWPFENIDHASDWFNATSIAEADRVKIGRTNARRLFKLDGA

SEQ ID NO: 124 - protein, 328 aa, Artificial Sequence
  synthetic construct; Dicamba decarboxylase variant clone: S03969214
MAQGKVALEEHFAIPETLQDSAGFVPGDYWKELQHRLLDIQDTRLKLMDAHGIETMILSLAAPAVQAIPDRRKAIEIARRANDFLAEECAKRPDRFLAFAALPLQDPDAATEELQRCVNDLGFVGALVNGFSQEGDGQTPLYYDLPQYRPFWGEVEKLDVPFYLHPRNPLPQDSRIYDGHPWLLGPTWAFAQETAVHALRLMASGLFDEHPQLNIILGHMGEGLPYMMWRIDHRVAWGKLPPAYPAKRRFMDYFNENFHITTSGNFRTQTLIDAILEIGADRILFSTDWPFENIDHASDWFNATSIAEADRVKIGRTNARRLFKLDGD

SEQ ID NO: 125 - protein, 328 aa, Artificial Sequence
  synthetic construct; Dicamba decarboxylase variant clone: S03970523
MAQGKVALEEHFAIPETLQDSAGFVPGDYWKELQHRLLDIQDTRLKLMDAHGIETMILSLAAPAVQAIPDRRKAIEIARRANDFLAEECAKRPDRFLAFAALPLQDPDAATEELQRCVNDLGFVGALVNGFSQEGDGQTPLYYDLPQYRPFWGEVEKLDVPFYLHPRNPLPQDSRIYDGHPWLLGPTWAFAQETAVHALRLMASGLFDEHPRLQIILGHMGEGLPYMMYRIDHRIAWVHEPPRYPAKRRFMDYFNENFHITTSGNFRTQTLIDAILEIGADRILFSTDWPFENIDHASDWFNATSIAEADRVKIGRTNARRLFKLDGA

SEQ ID NO: 126 - protein, 328 aa, Artificial Sequence
  synthetic construct; Dicamba decarboxylase variant clone: S03970792
MAQGKVALEEHFAIPETLQDSAGFVPGDYWKELQHRLLDIQDTRLKLMDAHGIETMILSLAAPAVQAIPDRRKAIEIARRANDFLAEECAKRPDRFLAFAALPLQDPDAATEELQRCVNDLGFVGALVNGFSQEGDGQTPLYYDLPQYRPFWGEVEKLDVPFYLHPRNPLPQDSRIYDGHPWLLGPTWAFAQETAVHALRLMASGLFDEHPRLNIILGHMGEGLPYMMYRIDHRIAWVKLPPRYPAKRRFMDYFNENFHITTSGNFRTQTLIDAILEIGADRILFSTDWPFENIDHAADWFNATSIAEADRVKIGRTNARRLFKLDGA

SEQ ID NO: 127 - protein, 328 aa, Artificial Sequence
  synthetic construct; Dicamba decarboxylase variant clone: S03985669
MAQGKVALEEHFAIPETLQDSAGFVPSDYWKELQHRLLDIQDTRLKLMDAHGIETMILSLAAPAVQAIPDRRKAIEIARRANDVLAEECAKRPDRFLAFAALPLQDPDAATEELQRCVNDLGFVGALVNGFSQEGDGQTPLYYDLPQYRPFWGEVEKLDVPFYLHPRNPLPQDSRIYDGHPWLLGPTWAFAQETAVHALRLMASGLFDEHPRLNIILGHMGEGLPYMMWRIDHRVAWVKLPPRYPAKRRFMDYFNENFHITTSGNFRTQTLIDAILEIGADRILFSTDWPFENIDHASDWFNATSIAEADRVKIGRTNARRLFKLDGD

SEQ ID NO: 128 - protein, 328 aa, Artificial Sequence
  synthetic construct; Dicamba decarboxylase variant clone: S03986272
MAQGKVALEEHFAIPETLQFSAGFVPGDYWKELQHRLLDIQDTRLKLMDAHGIETMILSLAAPAVQAIPDRRKAIEIARRANDVLAEECAKRPDRFLAFAALPLQDPDAATEELQRCVNDLGFVGALVNGFSQEGDGQTPLYYDLPQYRPFWGEVEKLDVPFYLHPRNPLPQDSRIYDGHPWLLGPTWAFAQETAVHALRLMASGLFDEHPRLQIILGHMGEGLPYMMYRIDHRIAWVKPPPRYPAKRRFMDYFNENFHITTSGNFRTQTLIDAILEIGADRILFSTDWPFENIDHASDWFASTSIAEADRVKIGRTNARRLFKLDGA

SEQ ID NO: 129 - protein, 328 aa, Artificial Sequence
  synthetic construct; Dicamba decarboxylase variant clone: S03988955
MAQGKVALEEHFAIPETLQDSAGFVPGDYLKELQHRLLDIQDTRLKLMDAHGIETMILSLAAPAVQAIPDRRKAIEIARRANDVLAEECAKRPDRFLAFAALPLQDPDAATEELQRCVNDLGFVGALVNGFSQEGDGQTPLYYDLPQYRPFWGEVEKLDVPFYLHPRNPLPQDSRIYDGHPWLLGPTWAFAQETAVHALRLMASGLFDEHPRLNIILGHMGEGLPYMMYRIDHRIAWVKEPPRYPAKRRFMDYFNENFHITTSGNFRTQTLIDAILEIGADRILFSTDWPFENIDHAADWFNATSIAEADRVKIGRTNARRLFKLDGA

SEQ ID NO: 130 - protein, 357 aa, Staphylococcus Aureus
MGSSHHHHHHSSGRENLYFQGMKSITFEEHYVIEDIQKETMNAISADPKGVPMKVMLEGLEKKTGFTNADELSHHDERIQFMNNQDVQIQVLSYGNGSPSNLVGQKAIELCQKANDQLANYIAQYPNRFVGFATLPINEPEAAAREFERCINDLGFKGALIMGRAQDGFLDQDKYDIIFKTAENLDVPIYLHPAPVNSDIYQSYYKGNYPEVTAATFACFGYGWHIDVGIHAIHLVLSGIFDRYPKLNMIIGHWGEFIPFFLERMDEALFAEHLNHSVSYYFKNSFYITPSGMLTKPQFDLVKKEVGIDRILYAADYPYIEPEKLGVFLDELGLTDEEKEKISYTNGAKLLGLSSNN

SEQ ID NO: 131 - protein, 312 aa, Lactobacillus Acidophilus
MSLTKIDAYAHILPAKYYQKMLSVEPNIPNMFPFIKIKTLMDLDERLTKWPDQNTKQVISLANISPEDFTDSKTSAELCQSANEELSNLVDQHPGKFAGAVAILPMNNIESACKVISSIKDDENLVGAQIFTRHLGKSIADKEFRPVLAQAAKLHVPLWMHPVFDARKPDNNLVFSWEYELSQAMLQLVQSDLFQDYPNLKILVHHAGAMVPFFSGRIDHILDEKHAQDFKKFYVDTAILGNTPALQLAIDYYGIDHVLFGTDAPFAVMPSGADQIITQAINDLTISDKDKQKIFHDNYYSLIKEGHHHHHH

SEQ ID NO: 132 - protein, 420 aa, Deinococcus Radiodurans
SLLRFSAVSRHHRGASIDPMTFSEATTPDALTPDAHTPRLLTCDVLYTGMGGAQSPGGVVVVGETVAAAGHPDELRRQYPHAAEERAGAVIAPPPVNAHTHLDMSAYEFQALPYFQWIPEVVIRGRHLRGVAAAQAGADTLTRLGAGGVGDIVWAPEVMDALLAREDLSGTLYFEVLNPFPDKADEVFAAARTHLERWRRLERPGLRLGLSPHTPFTVSHRLMRLLSDYAAGEGLPLQIHVAEHPTELEMFRTGGGPLWDNRMPALYPHTLAEVIGREPGPDLTPVRYLDELGVLAARPTLVHMVNVTPDDIARVARAGCAVVTCPRSNHHLECGTFDWPAFAAAGVEVALGTDSVASGETLNVREEVTFARQLYPGLDPRVLVRAAVKGGQRVVGGRTPFLRRGETWQEGFRWELSRDL

SEQ ID NO: 133 - protein, 328 aa, Artificial Sequence; identical to SEQ ID NO: 126
  synthetic construct; Dicamba decarboxylase variant

SEQ ID NO: 134 - protein, 328 aa, Artificial Sequence
  synthetic construct; Dicamba decarboxylase variant
MAQGKVALEEHFAIPETLQDSAGFVPGDYWKELQHRLLDIQDTRLKLMDAHGIETMILSLAAPAVQAIPDRRKAIEIARRANDMLAEECAKRPDRFLAFAALPLQDPDAATEELQRCVNDLGFVGALVNGFSQEGDGQTPLYYDLPQYRPFWGEVEKLDVPFYLHPRNPLPQDSRIYDGHPWLLGPTWAFAQETAVHALRLMASGLFDEHPRLNIILGHLGEGLPYMMYRIDHRIAWVHEPPRYPAKRRLMDYFNENFHITTSGNFRTQTLIDAILEIGADRILFSTDWPFENIDHAADWFNATSIAEADRVKIGRTNARRLFKLDGA

SEQ ID NO: 135 - protein, 328 aa, Artificial Sequence
  synthetic construct; Dicamba decarboxylase variant
MAQGKVALEEHFAIPETLQDSAGFVPGDYWKELQHRLLDIQDTRLRLMDAHGIETMILSLAAPAVQAIPDRRKAIEIARRANDFLAEECAKRPDRFLAFAALPLQDPDAATEELQRCVNDLGFVGALVNGFSVEGDGQTPLYYDLPQYRPFWGEVEKLDVPFYLHPRNPLPQDSRIYDGHPWLLGPTWAFAQETAVHALRLMASGLFDEHPRLNIILGHLGEGLPYMMYRIDHRIAWVKLPPRYPAKRRFMDYFLENFHITTSGNFRTQTLIDAILEIGADRILFSTDWPFENIDHAADWFNATSIAEADRVKIGRTNARRLFKLDGD

SEQ ID NO: 136 - protein, 328 aa, Artificial Sequence
  synthetic construct; Dicamba decarboxylase variant
MAQGKVALEEHFAIPETLQDSAGFVPGDYWKELQHRLLDIQDTRLKLMDAHGIETMILSLAAPAVQAIPDRRKAIEIARRANDFLAEECAKRPDRFLAFAALPLQDPDAATEELQRCVNTLGFVGALVNGFSVEGDGQTPLYYDLPQYRPFWGEVEKLDVPFYLHPRNPLPQDSRIYDGHPWLLGPTWAFAQETAVHALRLMASGLFDEHPRLNIILGHLGEGLPYMMYRIDHRIAWVHEPPRYPAKRRFMDYFNENFHITTSGNFRTQTLIDAILEIGADRILFSTDWPFENIDHAADWFNATSIAEADRVKIGRTNARRLFKLDGA

SEQ ID NO: 137 - protein, 328 aa, Artificial Sequence
  synthetic construct; Dicamba decarboxylase variant
MAQGKVALEEHFAIPETLQDSAGFVPGDYWKELQHRLLDIQDTRLKLMDAHGIETMILSLAAPAVQAIPDRRKAIEIARRANDFLAEECAKRPDRFLAFAALPLQDPDAATEELQRCVNTLGFVGALVNGFSQEGDGQTPLYYDLPQYRPFWGEVEKLDVPFYLHPRNPLPQDSRIYDGHPWLLGPTWAFAQETAVHALRLMASGLFDEHPRLNIILGHMGEGLPYMMYRIDHRIAWVHEPPRYPAKRRFMDYFNENFHITTSGNFRTQTLIDAILEIGADRILFSTDWPFENIDHAADWFNATSIAEADRLKIGRTNARRLFKLDGA

SEQ ID NO: 138 - protein, 328 aa, Artificial Sequence
  synthetic construct; Dicamba decarboxylase variant
MAQGKVALEEHFAIPETLQDSAGFVPGDYWKELQHRLLDIQDTRLKLMDAHGIETMILSLAAPAVQAIPDRRKAIEIARRANDFLAEECAKRPDRFLAFAALPLQDPDAATEELQRCVNDLGFVGALVNGFSQEGDGQTPLYYDLPQYRPFWGEVEKLDVPFYLHPRNPLPQDSRIYDGHPWLLGPTWAFAQETAVHALRLMASGLFDEHPRLNIILGHMGEGLPYMMYRIDHRIAWVHEPPRYPAKRRFMDYFNENFHITTSGNFRTQTLIDAILEIGADRILFSTDWPFENIDHAADWFNATSIAEADRLKIGRTNARRLFKLDLD

SEQ ID NO: 139 - protein, 328 aa, Artificial Sequence
  synthetic construct; Dicamba decarboxylase variant
MAQGKVALEEHFAIPETLQDSAGFVPGDYWKELQHRLLDIQDTRLKLMDAHGIETMILSLAAPAVQAIPDRRKAIEIARRANDFLAEECAKRPDRFLAFAALPLQDPDAATEELQRCVNDLGFVGALVNGFSQEGDGQTPLYYDLPQYRPFWGEVEKLDVPFYLHPRNPLPQDSRIYDGHPWLLGPTWAFAQETAVHALRLMASGLFDEHPRLNIILGHMGEGLPYMMYRIDHRIAWVKLPPRYPAKRRFMDYFNENFHITTSGNFRTQTLIDAILEIGADRILFSTDWPFENIDHAADWFNATSIAEADRLKIGRTNARRLFKLDGD

SEQ ID NO: 140 - protein, 328 aa, Artificial Sequence
  synthetic construct; Dicamba decarboxylase variant
MAQGKVALEEHFAIPETLQDSAGFVPGDYWKELQHRLLDIQDTRLKLMDAHGIETMILSLAAPAVQAIPDRRKAIEIARRANDFLAEECAKRPDRFLAFAALPLQDPDAATEELQRCVNDLGFVGALVNGFSQEGDGQTPLYYDLPQYRPFWGEVEKLDVPFYLHPRNPLPQDSRIYDGHPWLLGPTWAFAQETAVHALRLMASGLFDEHPRLNIILGHLGEGLPYMMYRIDHRIAWVHEPPRYPAKRRFMDYFNENFHITTSGNFRTQTLIDAILEIGADRILFSTDWPFENIDHAADWFNATSIAEADRVKIGRTNARRLFKLDGA

SEQ ID NO: 141 - protein, 328 aa, Artificial Sequence
  synthetic construct; Dicamba decarboxylase variant
MAQGKVALEEHFAIPETLNDSAGFVPGDYWKELQHRLLDIQDTRLKLMDAHGIETMILSLAAPAVQAIPDRRKAIEIARRANDMLAEECAKRPDRFLAFAALPLQDPDAATEELQRCVNDLGFVGALVNGFSQEGDGQTPLYYDLPQYRPFWGEVEKLDVPFYLHPRNPLPQDSRIYDGHPWLLGPTWAFAQETAVHALRLMASGLFDEHPRLNIILGHMGEGLPYMMYRIDHRIAWVHEPPRYPAKRRFMDYFNENFHITTSGNFRTQTLIDAILEIGADRILFSTDWPFENIDHAADWFNATSIAEADRVKIGRTNARRLFKLDLD

SEQ ID NO: 142 - protein, 328 aa, Artificial Sequence
  synthetic construct; Dicamba decarboxylase variant
MAQGKVALEEHFAIPETLQDSAGFVPGDYWKELQHRLLDIQDTRLKLMDAHGIETMILSLAAPAVQAIPDRRKAIEIARRANDFLAEECAKRPDRFLAFAALPLQDPDAATEELQRTVNDLGFVGALVNGFSQEGDGQTPLYYDLPQYRPFWGEVEKLDVPFYLHPRNPLPQDSRIYDGHPWLLGPTWAFAQETAVHALRLMASGLFDEHPRLNIILGHLGEGLPYMMYRIDHRIAWVHEPPRYPAKRRFMDYFNENFHITTSGNFRTQTLIDAILEIGADRILFSTDWPFENIDHAADWFNATSIAEADRVKIGRTNARRLFKLDLD

SEQ ID NO: 143 - protein, 328 aa, Artificial Sequence
  synthetic construct; Dicamba decarboxylase variant
MAQGKVALEEHFAIPETLQDSAGFVPSEYLKELQHRLLDIQDTRLKLMDAHGIETMILSLAAPAVQAIPDRRKAIEIARRANDFLAEECAKRPDRFLAFAALPMQDVDAATEELQRCVNDLGFVGALVNGFSVEGDGQTPLYYDLPQYRPFWGEVEKLDVPFYLHPRNPLPQDSRIYDGHPWLLGPTWAFAQETAVHALRLMASGLFDEHPRLNIILGHMGEGLPYMMYRIDHRIAWVHEPPRYPAKRRFMDYFNENFHITTSGNFRTQTLIDAILEIGADRILFSTDWPFENIDHAADWFNATSIAEADRVKIGRTNARRLFKLDGD

SEQ ID NO: 144 - protein, 328 aa, Artificial Sequence
  synthetic construct; Dicamba decarboxylase variant
MAQGKVALEEHFAIPETLQDSAGFVPGDYWKELQHRLLDIQDTRLRLMDAHGIETMILSLAAPAVQAIPDRRKAIEIARRANDFLAEECAKRPDRFLAFAALPLQDPDAASEELQRCVNDLGFVGALVNGFSQEGDGQTPLYYDLPQYRPFWGEVEKLDVPFYLHPRNPLPQDSRIYDGHPWLLGPTWAFAQETAVHALRLMASGLFDEHPRLNIILGHMGEGLPYMMYRIDHRIAWVHEPPRYPAKRRFMDYFNENFHITTSGNFRTQTLIDAILEIGADRILFSTDWPFENIDHAADWFNATSIAEADRLKIGRTNARRLFKLDGD

SEQ ID NO: 145 - protein, 328 aa, Artificial Sequence
  synthetic construct; Dicamba decarboxylase variant
MAQGKVALEEHFAIPETLQDSAGFVPGDYWKELQHRLLDIQDTRLKLMDAHGIETMILSLAAPAVQAIPDRRKAIEIARRANDFLAEECAKRPDRFLAFAALPLQDPDAATEELQRCVNDLGFVGALVNGFSVEGDGQTPLYYDLPQYRPFWGEVEKLDVPFYLHPRNPLPQDSRIYDGHPWLLGPTWAFAQETAVHALRLMASGLFDEHPRLNIILGHMGEGLPYMMYRIDHRIAWVKLPPRYPAKRRFMDYFNENFHITTSGNFRTQTLIDAILEIGADRILFSTDWPFENIDHATDWFNATSIAEADRVKIGRTNARRLFKLDGA

SEQ ID NO: 146 - protein, 328 aa, Artificial Sequence
  synthetic construct; Dicamba decarboxylase variant
MAQGKVALEEHFAIPETLQDSAGFVPGDYWKELQHRLLDIQDTRLKLMDAHGIETMILSLAAPAVQAIPDRRKAIEIARRANDFLAEECAKRPDRFLAFAALPLQDPDAATEELQRCVNDLGFVGALVNGFSQEGDGQTPLYYDLPQYRPFWGEVEKLDVPFYLHPRNPLPQDSRIYDGHPWLLGPTWAFAQETAVHALRLMASGLFDEHPRLNIILGHMGEGLPYMMYRIDHRIAWVKLPPRYPAKRRFMDYFNENFHITTSGNFRTQTLIDAILEIGADRILFSTDWPFENIDHAADWFNATSIAEADRVKIGRTNARRLFKLDGD

SEQ ID NO: 147 - protein, 328 aa, Artificial Sequence
  synthetic construct; Dicamba decarboxylase variant
MAQGKVALEEHFAIPETLQDSAGFVPGDYWKELQHRLLDIQDTRLKLMDAHGIETMILSLAAPAVQAIPDRRKAIEIARRANDFLAEECAKRPDRFLAFAALPMQDVDAATEELQRCVNDLGFVGALVNGFSQEGDGQTPLYYDLPQYRPFWGEVEKLDVPFYLHPRNPLPQDSRIYDGHPWLLGPTWAFAQETAVHALRLMASGLFDEHPRLNIILGHMGEGLPYMMYRIDHRIAWVKLPPRYPAKRRFMDYFNENFHITTSGNFRTQTLIDAILEIGADRILFSTDWPFENIDHAADWFNATSIAEADRLKIGRTNARRLFKLDLD

SEQ ID NO: 148 - protein, 328 aa, Artificial Sequence
  synthetic construct; Dicamba decarboxylase variant
MAQGKEALEEHFAIPETLNDSAGFVPGDYWKELQHRLLDIQDTRLKLMDAHQIETMILSLAAVGVQAIPDRRKAIEIARRANDMLAEECAKRPDRFLAFAALPLQDVDAASEELQRTVNTLGFVGALVNGFSVEGDGQTPLYYDLPQYRPFWGEVEKLDVPFYLHPRNPLPQDSRIYDGHPWLLGPTWAFAQETAVHALRLMASGLFDEHPRLNIILGHLGEGLPYMMYRIDHRIAWVKLPPRYPAKRRFMDYFNENFHITTSGNFRTQTLIDAILEIGADRILFSTDWPFENIDHAAAWFNATSIAEADRVKIGRTNARRLFKLDGA

SEQ ID NO: 149 - protein, 328 aa, Artificial Sequence
  synthetic construct; Dicamba decarboxylase variant
MAQGKVALEEHFAIPETLQDSAGFVPSEYLKELQHRLLDIQDTRLKLMDAHGIETMILSLAAPAVQAIPDRRKAIEIARRANDMLAEECAKRPDRFLAFAALPLQDPDAATEELQRCVNTLGFVGALVNGFSVEGDGQTPLYYDLPQYRPFWGEVEKLDVPFYLHPRNPLPQDSRIYDGHPWLLGPTWAFAQETAVHALRLMASGLFDEHPRLNIILGHLGEGLPYMMYRIDHRIAWVHEPPRYPAKRRFMDYFNENFHITTSGNFRTQTLIDAILEIGADRILFSTDWPFENIDHAADWFNATSIAEADRVKIGRTNARRLFKLDGD

SEQ ID NO: 150 - protein, 328 aa, Artificial Sequence
  synthetic construct; Dicamba decarboxylase variant
MAQGKVALEEHFAIPETLQDSAGFVPGDYWKELQHRLLDIQDTRLKLMDAHGIETMILSLAAPAVQAIPDRRKAIEIARRANDFLAEECAKRPDRFLAFAALPLQDPDAATEELQRTVNDLGFVGALVNGFSQEGDGQTPLYYDLPQYRPFWGEVEKLDVPFYLHPRNPLPQDSRIYDGHPWLLGPTWAFAQETAVHALRLMASGLFDEHPRLNIILGHMGEGLPYMMYRIDHRIAWVKLPPRYPAKRRFMDYFNENFHITTSGNFRTQTLIDAILEIGADRILFSTDWPFENIDHAADWFNATSIAEADRVKIGRTNARRLFKLDGD

SEQ ID NO: 151 - protein, 328 aa, Artificial Sequence
  synthetic construct; Dicamba decarboxylase variant
MAQGKVALEEHFAIPETLQDSAGFVPGDYWKELQHRLLDIQDTRLKLMDAHGIETMILSLAAPAVQAIPDRRKAIEIARRANDFLAEECAKRPDRFLAFAALPLQDPDAATEELQRCVNDLGFVGALVNGFSQEGDGQTPLYYDLPQYRPFWGEVEKLDVPFYLHPRNPLPQDSRIYDGHPWLLGPTWAFAQETAVHALRLMASGLFDEHPRLNIILGHMGEGLPYMMYRIDHRIAWVHQPPRYPAKRRFMDYFNENFHITTSGNFRTQTLIDAILEIGADRILFSTDWPFENIDHAADWFNATSIAEADRVKIGRTNARRLFKLDGD

SEQ ID NO: 152 - protein, 328 aa, Artificial Sequence
  synthetic construct; Dicamba decarboxylase variant
MAQGKVALEEHFAIPETLQDSAGFVPGDYWKELQHRLLDIQDTRLKLMDAHGIETMILSLAAPAVQAIPDRRKAIEIARRANDFLAEECAKRPDRFLAFAALPLQDPDAATEELQRCVNDLGFVGALVNGFSVEGDGQTPLYYDLPQYRPFWGEVEKLDVPFYLHPRNPLPQDSRIYDGHPWLLGPTWAFAQETAVHALRLMASGLFDEHPRLNIILGHMGEGLPYMMYRIDHRIAWVKLPPRYPAKRRFMDYFNENFHITTSGNFRTQTLIDAILEIGADRILFSTDWPFENIDHAADWFNATSIAEADRVKIGRTNARRLFKLDGA

SEQ ID NO: 153 - protein, 328 aa, Artificial Sequence
  synthetic construct; Dicamba decarboxylase variant
MAQGKVALEEHFAIPETLQDSAGFVPSEYLKELQHRLLDIQDTRLKLMDAHGIETMILSLAAPAVQAIPDRRKAIEIARRANDFLAEECAKRPDRFLAFAALPLQDVDAATEELQRCVNDLGFVGALVNGFSVEGDGQTPLYYDLPQYRPFWGEVEKLDVPFYLHPRNPLPQDSRIYDGHPWLLGPTWAFAQETAVHALRLMASGLFDEHPRLNIILGHLGEGLPYMMYRIDHRIAWVKLPPRYPAKRRFMDYFNENFHITTSGNFRTQTLIDAILEIGADRILFSTDWPFENIDHAADWFNATSIAEADRLKIGRTNARRLFKLDGD

SEQ ID NO: 154 - protein, 328 aa, Artificial Sequence
  synthetic construct; Dicamba decarboxylase variant
MAQGKVALEEHFAIPETLQDSAGFVPGDYWKELQHRLLDIQDTRLKLMDAHGIETMILSLAAPAVQAIPDRHKAIEIARRANDFLAEECAKRPDRFLAFAALPLQDPDAATEELQRTVNDLGFVGALVNGFSQEGDGQTPLYYDLPQYRPFWGEVEKLDVPFYLHPRNPLPQDSRIYDGHPWLLGPTWAFAQETAVHALRLMASGLFDEHPRLNIILGHMGEGLPYMMYRIDHRIAWVHEPPRYPAKRRFMDYFNENFHITTSGNFRTQTLIDAILEIGADRILFSTDWPFENIDHAADWFNATSIAEADRVKIGRTNARRLFKLDGD

SEQ ID NO: 155 - protein, 328 aa, Artificial Sequence
  synthetic construct; Dicamba decarboxylase variant
MAQGKVALEEHFAIPETLQDSAGFVPGDYWKELQHRLLDIQDTRLKLMDAHGIETMILSLAAPAVQAIPDRRKAIEIARRANDFLAEECAKRPDRFLAFAALPLQDPDAATEELQRCVNDLGFVGALVNGFSVEGDGQTPLYYDLPQYRPFWGEVEKLDVPFYLHPRNPLPQDSRIYDGHPWLLGPTWAFAQETAVHALRLMASGLFDEHPRLNIILGHLGEGLPYMMYRIDHRIAWVHEPPRYPAKRRFMDYFNENFHITTSGNFRTQTLIDAILEIGADRILFSTDWPFENIDHAADWFNATSIAEADRLKIGRTNARRLFKLDGA

SEQ ID NO: 156 - protein, 328 aa, Artificial Sequence
  synthetic construct; Dicamba decarboxylase variant
MAQGKVALEEHFAIPETLQDSAGFVPSDYLKELQHRLLDIQDTRLKLMDAHGIETMILSLAAPAVQAIPDRRKAIEIARRANDFLAEECAKRPDRFLAFAALPMQDPDAATEELQRCVNDLGFVGALVNGFSVEGDGQTPLYYDLPQYRPFWGEVEKLDVPFYLHPRNPLPQDSRIYDGHPWLLGPTWAFAQETAVHALRLMASGLFDEHPRLNIILGHLGEGLPYMMYRIDHRIAWVHEPPRYPAKRRFMDYFNENFHITTSGNFRTQTLIDAILEIGADRILFSTDWPFENIDHAADWFNATSIAEADRLKIGRTNARRLFKLDGA

SEQ ID NO: 157 - protein, 328 aa, Artificial Sequence
  synthetic construct; Dicamba decarboxylase variant
MAQGKVALEEHFAIPETLQDSAGFVPGDYWKELQHRLLDIQDTRLKLMDAHGIETMILSLAAPAVQAIPDRRKAIEIARRANDFLAEECAKRPDRFLAFAALPLQDPAAATEELQRCVNDLGFVGALVNGFSVEGDGQTPLYYDLPQYRPFWGEVEKLDVPFYLHPRNPLPQDSRIYDGHPWLLGPTWAFAQETAVHALRLMASGLFDEHPRLNIILGHMGEGLPYMMYRIDHRIAWVHEPPRYPAKRRFMDYFNENFHITTSGNFRTQTLIDAILEIGADRILFSTDWPFENIDHAADWFNATSIAEADRLKIGRTNARRLFKLDGD

SEQ ID NO: 158 - protein, 328 aa, Artificial Sequence
  synthetic construct; Dicamba decarboxylase variant
MAQGKVALEEHFAIPETLNDSAGFVPGDYWKELQHRLLDIQDTRLKLMDAHGIETMILSLAAPAVQAIPDRRKAIEIARRANDFLAEECAKRPDRFLAFAALPLQDPDAATEELQRCVNDLGFVGALVNGFSQEGDGQTPLYYDLPQYRPFWGEVEKLDVPFYLHPRNPLPQDSRIYDGHPWLLGPTWAFAQETAVHALRLMASGLFDEHPRLNIILGHMGEGLPYMMYRIDHRIAWVKLPPRYPAKRRFMDYFNENFHITTSGNFRTQTLIDAILEIGADRILFSTDWPFENIDHATAWFNATSIAEADRVKIGRTNARRLFKLDGA

SEQ ID NO: 159 - protein, 328 aa, Artificial Sequence
  synthetic construct; Dicamba decarboxylase variant
MAQGKVALEEHFAIPETLQDSAGFVPGDYWKELQHRLLDIQDTRLKLMDAHGIETMILSLAAPAVQAIPDRRKAIEIARRANDFLAEECAKRPDRFLAFAALPLQDPDAATEELQRCVNDLGFVGALVNGFSVEGDGQTPLYYDLPQYRPFWGEVEKLDVPFYLHPRNPLPQDSRIYDGHPWLLGPTWAFAQETAVHALRLMASGLFDEHPRLNIILGHLGEGLPYMMYRIDHRIAWVKLPPRYPAKRRFMDYFNENFHITTSGNFRTQTLIDAILEIGADRILFSTDWPFENIDHAADWFNATSIAEADRVKIGRTNARRLFKLDGA

SEQ ID NO: 160 - protein, 328 aa, Artificial Sequence
  synthetic construct; Dicamba decarboxylase variant
MAQGKVALEEHFAIPETLQDSAGFVPGDYWKELQHRLLDIQDTRLKLMDAHGIETMILSLAAPAVQAIPDRRKAIEIARRANDFLAEECAKRPDRFLAFAALPLQDPDAATEELQRCVNTLGFVGALVNGFSQEGDGQTPLYYDLPQYRPFWGEVEKLDVPFYLHPRNPLPQDSRIYDGHPWLLGPTWAFAQETAVHALRLMASGLFDEHPRLNIILGHMGEGLPYMMYRIDHRIAWVKLPPRYPAKRRFMDYFNENFHITTSGNFRTQTLIDAILEIGADRILFSTDWPFENIDHAADWFNATSIAEADRVKIGRTNARRLFKLDGD

SEQ ID NO: 161 - protein, 328 aa, Artificial Sequence
  synthetic construct; Dicamba decarboxylase variant
MAQGKVALEEHFAIPETLQDSAGFVPGDYWKELQHRLLDIQDTRLKLMDAHGIETMILSLAAPAVQAIPDRRKAIEIARRANDFLAEECAKRPDRFLAFAALPLQDPDAATEELQRCVNDLGFVGALVNGFSVEGDGQTPLYYDLPQYRPFWGEVEKLDVPFYLHPRNPLPQDSRIYDGHPWLLGPTWAFAQETAVHALRLMASGLFDEHPRLNIILGHMGEGLPYMMYRIDHRIAWVKLPPRYPAKRRFMDYFNENFHITTSGNFRTQTLIDAILEIGADRILFSTDWPFENIDHATAWFNATSIAEADRVKIGRTNARRLFKLDGD

SEQ ID NO: 162 - protein, 328 aa, Artificial Sequence
  synthetic construct; Dicamba decarboxylase variant
MAQGKVALEEHFAIPETLQDSAGFVPGDYWKELQHRLLDIQDTRLKLMDAHGIETMILSLAAPAVQAIPDRRKAIEIARRANDFLAEECAKRPDRFLAFAALPMQDVDAATEELQRCVNTLGFVGALVNGFSVEGDGQTPLYYDLPQYRPFWGEVEKLDVPFYLHPRNPLPQDSRIYDGHPWLLGPTWAFAQETAVHALRLMASGLFDEHPRLNIILGHLGEGLPYMMYRIDHRIAWVKLPPRYPAKRRFMDYFNENFHITTSGNFRTQTLIDAILEIGADRILFSTDWPFENIDHAADWFNATSIAEADRVKIGRTNARRLFKLDGA

SEQ ID NO: 163 - protein, 328 aa, Artificial Sequence
  synthetic construct; Dicamba decarboxylase variant
MAQGKVALEEHFAIPETLQDSAGFVPCEYWKELQHRLLDIQDTRLKLMDAHGIETMILSLAAPAVQAIPDRRKAIEIARRANDFLAEECAKRPDRFLAFAALPMQDPDAATEELQRCVNNLGFVGALVNGFSVEGDGQTPLYYDLPQYRPFWGEVEKLDVPFYLHPRNPLPQDSRIYDGHPWLLGPTWAFAQETAVHALRLMASGLFDEHPRLNIILGHMGEGLPYMMYRIDHRIAWVQEPPRYPAKRRFMDYFNENFHITTSGNFRTQTLIDAILEIGADRILFSTDWPFENIDHAADWFNATSIAEADRVKIGRTNARRLFKLDGD

SEQ ID NO: 164 - protein, 328 aa, Artificial Sequence
  synthetic construct; Dicamba decarboxylase variant
MAQGKVALEEHFAIPETLQDSAGFVPGDYWKELQHRLLDIQDTRLKLMDAHGIETMILSLAAPGVQAIPDRRKAIEIARRANDILAEECAKRPDRFLAFAALPLQDPDAATEELQRCVNDLGFVGALVNGFSQEGDGQTPLYYDLPQYRPFWGEVEKLDVPFYLHPRNPLPQDSRIYDGHPWLLGPTWAFAQETAVHALRLMASGLFDEHPRLNIILGHLGEGLPYMMYRIDHRIAWVHEPPRYPAKRRFMDYFNENFHITTSGNFRTQTLIDAILEIGADRILFSTDWPFENIDHAADWFNATSIAEADRVKIGRTNARRLFKLDGD

SEQ ID NO: 165 - protein, 328 aa, Artificial Sequence
  synthetic construct; Dicamba decarboxylase variant
MAQGKVALEEHFAIPETLQDSAGFVPGDYWKELQHRLLDIQDTRLKLMDAHGIETMILSLAAPAVQAIPDRRKAIEIARRANDFLAEECAKRPDRFLAFAALPLQDPDAATEELQRCVNDLGFVGALVNGFSQEGDGQTPLYYDLPQYRPFWGEVEKLDVPFYLHPRNPLPQDSRIYDGHPWLLGPTWAFAQETAVHALRLMASGLFDEHPRLNIILGHMGEGLPYMMYRIDHRIAWVHEPPRYPAKRRFMDYFNENFHITTSGNFRTQTLIDAILEIGADRILFSTDWPFENIDHAADWFNATSIAEADRVKIGRTNAHRLFKLDGA

SEQ ID NO: 166 - protein, 328 aa, Artificial Sequence
  synthetic construct; Dicamba decarboxylase variant
MAQGKVALEEHFAIPETLQDSAGFVPGDYWKELQHRLLDIQDTRLKLMDAHGIETMILSLAAPAVQAIPDRRKAIEIARRANDFLAEECAKRPDRFLAFAALPLQDPDAATEELQRCVNNLGFVGALVNGFSQEGDGQTPLYYDLPQYRPFWGEVEKLDVPFYLHPRNPLPQDSRIYDGHPWLLGPTWAFAQETAVHALRLMASGLFDEHPRLNIILGHMGEGLPYMMYRIDHRIAWVHEPPRYPAKRRFMDYFNENFHITTSGNFRTQTLIDAILEIGADRILFSTDWPFENIDHAADWFNATSIAEADRVKIGRTNARRLFKLDGA

SEQ ID NO: 167 - protein, 328 aa, Artificial Sequence
  synthetic construct; Dicamba decarboxylase variant
MAQGKVALEEHFAIPETLQDSAGFVPGDYWKELQHRLLDIQDTRLKLMDAHGIETMILSLAAPAVQAIPDRRKAIEIARRANDMLAEECAKRPDRFLAFAALPLQDPDAATEELQRCVNDLGFVGALVNGFSVEGDGQTPLYYDLPQYRPFWGEVEKLDVPFYLHPRNPLPQDSRIYDGHPWLLGPTWAFAQETAVHALRLMASGLFDEHPRLNIILGHLGEGLPYMMYRIDHRIAWVHEPPRYPAKRRFMDYFNENFHITTSGNFRTQTLIDAILEIGADRILFSTDWPFENIDHAADWFNATSIAEADRVKIGRTNARRLFKLDGD

SEQ ID NO: 168 - protein, 328 aa, Artificial Sequence
  synthetic construct; Dicamba decarboxylase variant
MAQGKVALEEHFAIPETLQDSAGFVPGDYWKELQHRLLDIQDTRLKLMDAHGIETMILSLAAPAVQAIPDRRKAIEIARRANDFLAEECAKRPDRFLAFAALPLQDPDAATEELQRCVNTLGFVGALVNGFSQEGDGQTPLYYDLPQYRPFWGEVEKLDVPFYLHPRNPLPQDSRIYDGHPWLLGPTWAFAQETAVHALRLMASGLFDEHPRLNIILGHLGEGLPYMMYRIDHRIAWVHEPPRYPAKRRFMDYFNENFHITTSGNFRTQTLIDAILEIGADRILFSTDWPFENIDHAADWFNATSIAEADRVKIGRTNARRLFKLDLD

SEQ ID NO: 169 - protein, 328 aa, Artificial Sequence
  synthetic construct; Dicamba decarboxylase variant
MAQGKVALEEHFAIPETLQDSAGFVPGDYWKELQHRLLDIQDTRLKLMDAHQIETMILSLAAPAVQAIPDRRKAIEIARRANDFLAEECAKRPDRFLAFAALPLQDPDAATEELQRCVNDLGFVGALVNGFSQEGDGQTPLYYDLPQYRPFWGEVEKLDVPFYLHPRNPLPQDSRIYDGHPWLLGPTWAFAQETAVHALRLMASGLFDEHPRLNIILGHMGEGLPYMMYRIDHRIAWVHEPPRYPAKRRFMDYFNENFHITTSGNFRTQTLIDAILEIGADRILFSTDWPFENIDHAADWFNATSIAEADRVKIGRTNARRLFKLDGD

SEQ ID NO: 170 - protein, 328 aa, Artificial Sequence
  synthetic construct; Dicamba decarboxylase variant
MAQGKVALEEHFAIPETLQDSAGFVPGDYWKELQHRLLDIQDTRLRLMDAHGIETMILSLAAPAVQAIPDRRKAIEIARRANDFLAEECAKRPDRFLAFAALPLQDPDAATEELQRCVNDLGFVGALVNGFSVEGDGQTPLYYDLPQYRPFWGEVEKLDVPFYLHPRNPLPQDSRIYDGHPWLLGPTWAFAQETAVHALRLMASGLFDEHPRLNIILGHMGEGLPYMMYRIDHRIAWVHEPPRYPAKRRFMDYFNENFHITTSGNFRTQTLIDAILEIGADRILFSTDWPFENIDHAAAWFNATSIAEADRVKIGRTNARRLFKLDGA

SEQ ID NO: 171 - protein, 328 aa, Artificial Sequence
  synthetic construct; Dicamba decarboxylase variant
MAQGKVALEEHFAIPETLQDSAGFVPGDYWKELQHRLLDIQDTRLKLMDAHGIETMILSLAAPAVQAIPDRRKAIEIARRANDFLAEECAKRPDRFLAFAALPLQDPDAATEELQRTVNDLGFVGALVNGFSQEGDGQTPLYYDLPQYRPFWGEVEKLDVPFYLHPRNPLPQDSRIYDGHPWLLGPTWAFAQETAVHALRLMASGLFDEHPRLNIILGHMGEGLPYMMYRIDHRIAWVHEPPRYPAKRRFMDYFNENFHITTSGNFRTQTLIDAILEIGADRILFSTDWPFENIDHAADWFNATSIAEADRLKIGRTNARRLFKLDGA

SEQ ID NO: 172 - protein, 328 aa, Artificial Sequence
  synthetic construct; Dicamba decarboxylase variant
MAQGKVALEEHFAIPETLQDSAGFVPGDYWKELQHRLLDIQDTRLKLMDAHGIETMILSLAAPAVQAIPDRRKAIEIARRANDFLAEECAKRPDRFLAFAALPLQDPDAATEELQRCVNDLGFVGALVNGFSQEGDGQTPLYYDLPQYRPFWGEVEKLDVPFYLHPRNPLPQDSRIYDGHPWLLGPTWAFAQETAVHALRLMASGLFDEHPRLNIILGHLGEGLPYMMYRIDHRIAWVHEPPRYPAKRRFMDYFNENFHITTSGNFRTQTLIDAILEIGADRILFSTDWPFENIDHAADWFNATSIAEADRLKIGRTNARRLFKLDGA

SEQ ID NO: 173 - protein, 328 aa, Artificial Sequence
  synthetic construct; Dicamba decarboxylase variant
MAQGKVALEEHFAIPETLQDSAGFVPSDYRKELQHRLLDIQDTRLKLMDAHGIETMILSLAAPAVQAIPDRRKAIEIARRANDFLAEECAKRPDRFLAFAALPLQDPDAATEELQRCVNDLGFVGALVNGFSVEGDGQTPLYYDLPQYRPFWGEVEKLDVPFYLHPRNPLPQDSRIYDGHPWLLGPTWAFAQETAVHALRLMASGLFDEHPRLNIILGHMGEGLPYMMYRIDHRIAWVHEPPRYPAKRRFMDYFNENFHITTSGNFRTQTLIDAILEIGADRILFSTDWPFENIDHAADWFNATSIAEADRVKIGRTNARRLFKLDGD

SEQ ID NO: 174 - protein, 328 aa, Artificial Sequence
  synthetic construct; Dicamba decarboxylase variant
MAQGKVALEEHFAIPETLQDSAGFVPGDYWKELQHRLLDIQDTRLKLMDAHGIGTMILSLAAPAVQAIPDRRKAIEIARRANDFLAEECAKRPDRFLAFAALPLQDPDAATEELQRCVNDLGFVGALVNGFSQEGDGQTPLYYDLPQYRPFWGEVEKLDVPFYLHPRNPLPQDSRIYDGHPWLLGPTWAFAQETAVHALRLMASGLFDEHPRLNIILGHLGEGLPYMMYRIDHRIAWVHEPPRYPAKRRFMDYFNENFHITTSGNFRTQTLIDAILEIGADRILFSTDWPFENIDHAADWFNATSIAEADRLKIGRTNARRLFKLDGA

SEQ ID NO: 175 - protein, 328 aa, Artificial Sequence
  synthetic construct; Dicamba decarboxylase variant
MAQGKVALEEHFAIPETLQDSAGFVPGDYWKELQHRLLDIQDTRLKLMDAHGIETMILSLAAPAVQAIPDRRKAIEIARRANDFLAEECAKRPDRFLAFAALPLQDPDAASEELQRCVNDLGFVGALVNGFSVEGDGQTPLYYDLPQYRPFWGEVEKLDVPFYLHPRNPLPQDSRIYDGHPWLLGPTWAFAQETAVHALRLMASGLFDEHPRLNIILGHLGEGLPYMMYRIDHRIAWVHEPPRYPAKRRFMDYFNENFHITTSGNFRTQTLIDAILEIGADRILFSTDWPFENIDHAADWFNATSIAEADRVKIGRTNARRLFKLDGD

SEQ ID NO: 176 - protein, 328 aa, Artificial Sequence
  synthetic construct; Dicamba decarboxylase variant
MAQGKVALEEHFAIPETLQDSAGFVPGDYWKELQHRLLDIQDTRLKLMDAHGIETMILSLAAPAVQAIPDRRKAIEIARRANDFLAEECAKRPDRFLAFAALPLQDPDAATEELQRCVNDLGFVGALVNGFSVEGDGQTPLYYDLPQYRPFWGEVEKLDVPFYLHPRNPLPQDSRIYDGHPWLLGPTWAFAQETAVHALRLMASGLFDEHPRLNIILGHLGEGLPYMMYRIDHRIAWVKLPPRYPAKRRFMDYFNENFHITTSGNFRTQTLIDAILEIGADRILFSTDWPFENIDHAADWFNATSIAEADRVKIGRTNARRLFKLDGR

SEQ ID NO: 177 - protein, 328 aa, Artificial Sequence
  synthetic construct; Dicamba decarboxylase variant
MAQGKVALEEHFAIPATLQDSAGFVPGDYWKELQHRLLDIQDTRLKLMDAHGIETMILSLAAPAVQAIPDRRKAIEIARRANDFLAEECAKRPDRFLAFAALPLQDPDAATEELQRCVNDLGFVGALVNGFSQEGDGQTPLYYDLPQYRPFWGEVEKLDVPFYLHPRNPLPQDSRIYDGHPWLLGPTWAFAQETAVHALRLMASGLFDEHPRLNIILGHMGEGLPYMMYRIDHRIAWVHEPPRYPAKRRFMDYFNENFHITTSGNFRTQTLIDAILEIGADRILFSTDWPFENIDHATDWFNATSIAEADRLKIGRTNARRLFKLDGA

SEQ ID NO: 178 - protein, 328 aa, Artificial Sequence
  synthetic construct; Dicamba decarboxylase variant
MAQGKVALEEHFAIPETLQDSAGFVPGDYWKELQHRLLDIQDTRLKLMDAHGIETMILSLAAPAVQAIPDRRKAIEIARRANDFLAEECAKRPDRFLAFAALPLQDPDAATEELQRCVNTLGFVGALVNGFSQEGDGQTPLYYDLPQYRPFWGEVEKLDVPFYLHPRNPLPQDSRIYDGHPWLLGPTWAFAQETAVHALRLMASGLFDEHPRLNIILGHLGEGLPYMMYRIDHRIAWVHEPPRYPAKRRFMDYFNENFHITTSGNFRTQTLIDAILEIGADRILFSTDWPFENIDHAAAWFNATSIAEADRVKIGRTNARRLFKLDGD

SEQ ID NO: 179 - protein, 328 aa, Artificial Sequence
  synthetic construct; Dicamba decarboxylase variant
MAQGKVALEEHFAIPETLQDSAGFVPGDYWKELQHRLLDIQDTRLKLMDAHGIETMILSLAAPGVQAIPDRVKAIEIARRANDFLAEECAKRPDRFLAFAALPLQDPDAATEELQRCVNDLGFVGALVNGFSQEGDGQTPLYYDLPQYRPFWGEVEKLDVPFYLHPRNPLPQDSRIYDGHPWLLGPTWAFAQETAVHALRLMASGLFDEHPRLNIILGHMGEGLPYMMYRIDHRIAWVHEPPRYPAKRRFMDYFNENFHITTSGNFRTQTLIDAILEIGADRILFSTDWPFENIDHAADWFNATSIAEADRVKIGRTNARRLFKLDGA

SEQ ID NO: 180 - protein, 328 aa, Artificial Sequence
  synthetic construct; Dicamba decarboxylase variant
MAQGKVALEEHFAIPETLQDSAGFVPGDYWKELQHRLLDIQDTRLKLMDAHGIETMILSLAAPAVQAIPDRRKAIEIARRANDMLAEECAKRPDRFLAFAALPLQDPDAATEELQRCVNDLGFVGAMVNGFSQEGDGQTPLYYDLPQYRPFWGEVEKLDVPFYLHPRNPLPQDSRIYDGHPWLLGPTWAFAQETAVHALRLMASGLFDEHPRLNIILGHLGEGLPYMMYRIDHRIAWVHEPPRYPAKRRFMDYFNENFHITTSGNFRTQTLIDAILEIGADRILFSTDWPFENIDHAADWFNATSIAEADRVKIGRTNARRLFKLDGA

SEQ ID NO: 181 - protein, 328 aa, Artificial Sequence
  synthetic construct; Dicamba decarboxylase variant
MAQGKVALEEHFAIPETLQDSAGFVPGDYWKELQHRLLDIQDTRLHLMDAHGIETMILSLAAPGVQAIPDRRKAIEIARRANDFLAEECAKRPDRFLAFAALPLQDPDAATEELQRCVNDLGFVGALVNGFSQEGDGQTPLYYDLPQYRPFWGEVEKLDVPFYLHPRNPLPQDSRIYDGHPWLLGPTWAFAQETAVHALRLMASGLFDEHPRLNIILGHMGEGLPYMMYRIDHRIAWVHPPPRYPAKRRFMDYFNENFHITTSGNFRTQTLIDAILEIGADRILFSTDWPFENIDHAADWFNATSIAEADRVKIGRTNARRLFKLDGA

SEQ ID NO: 182 - protein, 328 aa, Artificial Sequence
  synthetic construct; Dicamba decarboxylase variant
MAQGKVALEEHFAIPETLQDSAGFVPGDYWKELQHRLLDIQDTRLKLMDAHGIETMILSLAAPAVQAIPDRRKAIEIARRANDFLAEECAKRPDRFLAFAALPLQDPDAATEELQRCVNTLGFVGALVNGFSQEGDGQTPLYYDLPQYRPFWGEVEKLDVPFYLHPRNPLPQDSRIYDGHPWLLGPTWAFAQETAVHALRLMASGLFDEHPRLNIILGHMGEGLPYMMYRIDHRIAWVHEPPRYPAKRRFMDYFNENFHITTSGNFRTQTLIDAILEIGADRILFSTDWPFENIDHAADWFNATSIAEADRVKIGRTNARRLFKLDGD

SEQ ID NO: 183 - protein, 328 aa, Artificial Sequence
  synthetic construct; Dicamba decarboxylase variant
MAQGKVALEEHFAIPETLQDSAGFVPGDYWKELQHRLLDIQDTRLKLMDAHGIETMILSLAAPAVQAIPDRRKAIEIARRANDFLAEECAKRPDRFLAFAALPLQDPDAATEELQRCVNTLGFVGALVNGFSQEGDGQTPLYYDLPQYRPFWGEVEKLDVPFYLHPRNPLPQDSRIYDGHPWLLGPTWAFAQETAVHALRLMASGLFDEHPRLNIILGHMGEGLPYMMYRIDHRIAWVHEPPRYPAKRRFMDYFNENFHITTSGNFRTQTLIDAILEIGADRILFSTDWPFENIDHAADWFNATSIAEADRVKIGRTNARRLFKLDGA

SEQ ID NO: 184 - protein, 328 aa, Artificial Sequence
  synthetic construct; Dicamba decarboxylase variant
MAQGKVALEEHFAIPETLQDSAGFVPGDYWKELQHRLLDIQDTRLKLMDAHGIETMILSLAAPAVQAIPDRRKAIEIARRANDFLAEECAKRPDRFLAFAALPLQDPDAATEELQRCVNDLGFVGALVNGFSQEGDGQTPLYYDLPQYRPFWGEVEKLDVPFYLHPRNPLPQDSRIYDGHPWLLGPTWAFAQETAVHALRLMASGLFDEHPRLNIILGHMGEGLPYMMYRIDHRIAWVHPPPRYPAKRRFMDYFNENFHITTSGNFRTQTLIDAILEIGADRILFSTDWPFENIDHAADWFNATSIAEADRVKIGRTNARRLFKLDGA

SEQ ID NO: 185 - protein, 328 aa, Artificial Sequence
  synthetic construct; Dicamba decarboxylase variant
MAQGKVALEEHFAIPETLQDSAGFVPGDYWKELQHRLLDIQDTRLKLMDAHGIETMILSLAAPAVQAIPDRRKAIEIARRANDFLAEECAKRPDRFLAFAALPLQDPDAATEELQRCVNDLGFVGALVNGFSVEGDGQTPLYYDLPQYRPFWGEVEKLDVPFYLHPRNPLPQDSRIYDGHPWLLGPTWAFAQETAVHALRLMASGLFDEHPRLNIILGHMGEGLPYMMYRIDHRIAWVHEPPRYPAKRRFMDYFNENFHITTSGNFRTQTLIDAILEIGADRILFSTDWPFENIDHAADWFNATSIAEADRVKIGRTNARRLFKLDGA

SEQ ID NO: 186 - protein, 328 aa, Artificial Sequence
  synthetic construct; Dicamba decarboxylase variant
MAQGKVALEEHFAIPETLQDSAGFVPGDYWKELQHRLLDIQDTRLKLMDAHGIETMILSLAAPAVQAIPDRRKAIEIARRANDFLAEECAKRPDRFLAFAALPLQDPDAATEELQRCVNDLGFVGALVNGFSVEGDGQTPLYYDLPQYRPFWGEVEKLDVPFYLHPRNPLPQDSRIYDGHPWLLGPTWAFAQETAVHALRLMASGLFDEHPRLNIILGHMGEGLPYMMYRIDHRIAWVHEPPRYPAKRRFMDYFNENFHITTSGNFRTQTLIDAILEIGADRILFSTDWPFENIDHAADWFNATSIAEADRLKIGRTNARRLFKLDLD

SEQ ID NO: 187 - protein, 328 aa, Artificial Sequence
  synthetic construct; Dicamba decarboxylase variant
MAQGKVALEEHFAIPETLQDSAGFVPGDYWKELQHRLLDIQDTRLKLMDAHGIETMILSLAAPAVQAIPDRRKAIEIARRANDFLAEECAKRPDRFLAFAALPLQDPDAATEELQRCVNDLGFVGALVNGFSQEGDGQTPLYYDLPQYRPFWGEVEKLDVPFYLHPRNPLPQDSRIYDGHPWLLGPTWAFAQETAVHALRLMASGLFDEHPRLNIILGHLGEGLPYMMYRIDHRIAWVKLPPRYPAKRRFMDYFNENFHITTSGNFRTQTLIDAILEIGADRILFSTDWPFENIDHAADWFNATSIAEADRLKIGRTNARRLFKLDGD

SEQ ID NO: 188 - protein, 328 aa, Artificial Sequence
  synthetic construct; Dicamba decarboxylase variant
MAQGKVALEEHFAIPETLQDSAGFVPGDYWKELQHRLLDIQDTRLHLMDAHGIETMILSLAAPAVQAIPDRRKAIEIARRANDFLAEECAKRPDRFLAFAALPLQDPDAATEELQRCVNDLGFVGALVNGFSQEGDGQTPLYYDLPQYRPFWGEVEKLDVPFYLHPRNPLPQDSRIYDGHPWLLGPTWAFAQETAVHALRLMASGLFDEHPRLNIILGHMGEGLPYMMYRIDHRIAWVHQPPRYPAKRRFMDYFNENFHITTSGNFRTQTLIDAILEIGADRILFSTDWPFENIDHAADWFNATSIAEADRVKIGRTNARRLFKLDGA

SEQ ID NO: 189 - protein, 328 aa, Artificial Sequence
  synthetic construct; Dicamba decarboxylase variant
MAQGKVALEEHFAIPETLQDSAGFVPGDYWKELQHRLLDIQDTRLKLMDAHGIETMILSLAAPAVQAIPDRRKAIEIARRANDFLAEECAKRPDRFLAFAALPLQDPDAATEELQRCVNDLGFVGALVNGFSQEGDGQTPLYYDLPQYRPFWGEVEKLDVPFYLHPRNPLPQDSRIYDGHPWLLGPTWAFAQETAVHALRLMASGLFDEHPRLNIILGHLGEGLPYMMYRIDHRIAWVHPPPRYPAKRRFMDYFNENFHITTSGNFRTQTLIDAILEIGADRILFSTDWPFENIDHAADWFNATSIAEADRLKIGRTNARRLFKLDGA

SEQ ID NO: 190 - protein, 328 aa, Artificial Sequence
  synthetic construct; Dicamba decarboxylase variant
MAQGKVALEEHFAIPETLQDSAGFVPGDYWKELQHRLLDIQDTRLKLMDAHGIETMILSLAAPAVQAIPDRRKAIEIARRANDMLAEECAKRPDRFLAFAALPLQDPDAATEELQRCVNDLGFVGALVNGFSQEGDGQTPLYYDLPQYRPFWGEVEKLDVPFYLHPRNPLPQDSRIYDGHPWLLGPTWAFAQETAVHALRLMASGLFDEHPRLNIILGHLGEGLPYMMYRIDHRIAWVHPPPRYPAKRRFMDYFNENFHITTSGNFRTQTLIDAILEIGADRILFSTDWPFENIDHAADWFNATSIAEADRVKIGRTNARRLFKLDGD

SEQ ID NO: 191 - protein, 328 aa, Artificial Sequence
  synthetic construct; Dicamba decarboxylase variant
MAQGKVALEEHFAIPETLQDSAGFVPGDYWKELQHRLLDIQDTRLKLMDAHGIETMILSLAAPAVQAIPDRRKAIEIARRANDFLAEECAKRPDRFLAFAALPLQDPDAATEELQRTVNDLGFVGALVNGFSVEGDGQTPLYYDLPQYRPFWGEVEKLDVPFYLHPRNPLPQDSRIYDGHPWLLGPTWAFAQETAVHALRLMASGLFDEHPRLNIILGHLGEGLPYMMYRIDHRIAWVKLPPRYPAKRRFMDYFNENFHITTSGNFRTQTLIDAILEIGADRILFSTDWPFENIDHAADWFNATSIAEADRLKIGRTNARRLFKLDGD

SEQ ID NO: 192 - protein, 328 aa, Artificial Sequence
  synthetic construct; Dicamba decarboxylase variant
MAQGKVALEEHFAIPETLQDSAGFVPGDYWKELQHRLLDIQDTRLKLMDAHGIETMILSLAAPAVQAIPDRRKAIEIARRANDMLAEECAKRPDRFLAFAALPLQDPDAATEELQRCVNDLGFVGALVNGFSQEGDGQTPLYYDLPQYRPFWGEVEKLDVPFYLHPRNPLPQDSRIYDGHPWLLGPTWAFAQETAVHALRLMASGLFDEHPRLNIILGHLGEGLPYMMYRIDHRIAWVHEPPRYPAKRRFMDYFNENFHITTSGNFRTQTLIDAILEIGADRILFSTDWPFENIDHAADWFNATSIAEADRVKIGRTNARRLFKLDGA

SEQ ID NO: 193 - protein, 328 aa, Artificial Sequence
  synthetic construct; Dicamba decarboxylase variant
MAQGKVALEEHFAIPETLQDSAGFVPGDYWKELQHRLLDIQDTRLKLMDAHGIETMILSLAAPAVQAIPDRRKAIEIARRANDFLAEECAKRPDRFLAFAALPLQDPDAATEELQRCVNDLGFVGALVNGFSQEGDGQTPLYYDLPQYRPFWGEVEKLDVPFYLHPRNPLPQDSRIYDGHPWLLGPTWAFAQETAVHALRLMASGLFDEHPRLNIILGHLGEGLPYMMYRIDHRIAWVHEPPRYPAKRRFMDYFNENFHITTSGNFRTQTLIDAILEIGADRILFSTDWPFENIDHAADWFNATSIAEADRVKIGRTNARRLFKLDGD

SEQ ID NO: 194 - protein, 328 aa, Artificial Sequence
  synthetic construct; Dicamba decarboxylase variant
MAQGKVALEEHFAIPETLQDSAGFVPGDYWKELQHRLLDIQDTRLKLMDAHGIETMILSLAAPAVQAIPDRRKAIEIARRANDFLAEECAKRPDRFLAFAALPLQDPDAATEELQRCVNDLGFVGALVNGFSQEGDGQTPLYYDLPQYRPFWGEVEKLDVPFYLHPRNPLPQDSRIYDGHPWLLGPTWAFAQETAVHALRLMASGLFDEHPRLNIILGHMGEGLPYMMYRIDHRIAWVHEPPRYPAKRRFMDYFNENFHITTSGNFRTQTLIDAILEIGADRILFSTDWPFENIDHAADWFNATSIAEADRLKIGRTNARRLFKLDGA

SEQ ID NO: 195 - protein, 328 aa, Artificial Sequence
  synthetic construct; Dicamba decarboxylase variant
MAQGKVALEEHFAIPETLNDSAGFVPGDYWKELQHRLLDIQDTRLKLMDAHGIETMILSLAAPAVQAIPDRRKAIEIARRANDFLAEECAKRPDRFLAFAALPLQDPDAASEELQRCVNDLGFVGALVNGFSVEGDGQTPLYYDLPQYRPFWGEVEKLDVPFYLHPRNPLPQDSRIYDGHPWLLGPTWAFAQETAVHALRLMASGLFDEHPRLNIILGHMGEGLPYMMYRIDHRIAWVHEPPRYPAKRRFMDYFNENFHITTSGNFRTQTLIDAILEIGADRILFSTDWPFENIDHATAWFNATSIAEADRVKIGRTNARRLFKLDLD

SEQ ID NO: 196 - protein, 328 aa, Artificial Sequence
  synthetic construct; Dicamba decarboxylase variant
MAQGKVALEEHFAIPETLNDSAGFVPGDYWKELQHRLLDIQDTRLKLMDAHGIETMILSLAAPAVQAIPDRRKAIEIARRANDFLAEECAKRPDRFLAFAALPLQDPDAATEELQRCVNDLGFVGALVNGFSQEGDGQTPLYYDLPQYRPFWGEVEKLDVPFYLHPRNPLPQDSRIYDGHPWLLGPTWAFAQETAVHALRLMASGLFDEHPRLNIILGHMGEGLPYMMYRIDHRIAWVHEPPRYPAKRRFMDYFNENFHITTSGNFRTQTLIDAILEIGADRILFSTDWPFENIDHAADWFNATSIAEADRVKIGRTNARRLFKLDGA

SEQ ID NO: 197 - protein, 328 aa, Artificial Sequence
  synthetic construct; Dicamba decarboxylase variant
MAQGKVALEEHFAIPETLQDSAGFVPGDYWKELQHRLLDIQDTRLKLMDAHGIETMILSLAAPAVQAIPDRRKAIEIARRANDFLAEECAKRPDRFLAFAALPLQDPDAATEELQRCVNDLGFVGALVNGFSQEGDGQTPLYYDLPQYRPFWGEVEKLDVPFYLHPRNPLPQDSRIYDGHPWLLGPTWAFAQETAVHALRLMASGLFDEHPRLNIILGHMGEGLPYMMYRIDHRIAWVHEPPRYPAKRRFMDYFNENFHITTSGNFRTQTLIDAILEIGADRILFSTDWPFENIDHAADWFNATSIAEADRVKIGRTNARRLFKLDLD

SEQ ID NO: 198 - protein, 328 aa, Artificial Sequence
  synthetic construct; Dicamba decarboxylase variant
MAQGKVALEEHFAIPETLQDSAGFVPGDYWKELQHRLLDIQDTRLKLMDAHGIETMILSLAAPAVQAIPDRRKAIEIARRANDFLAEECAKRPDRFLAFAALPLQDPDAATEELQRTVNDLGFVGALVNGFSQEGDGQTPLYYDLPQYRPFWGEVEKLDVPFYLHPRNPLPQDSRIYDGHPWLLGPTWAFAQETAVHALRLMASGLFDEHPRLNIILGHMGEGLPYMMYRIDHRIAWVHEPPRYPAKRRFMDYFNENFHITTSGNFRTQTLIDAILEIGADRILFSTDWPFENIDHAADWFNATSIAEADRLKIGRTNARRLFKLDGD

SEQ ID NO: 199 - protein, 328 aa, Artificial Sequence
  synthetic construct; Dicamba decarboxylase variant
MAQGKVALEEHFAIPETLQDSAGFVPGDYWKELQHRLLDIQDTRLKLMDAHGIETMILSLAAPAVQAIPDRRKAIEIARRANDFLAEECAKRPDRFLAFAALPLQDPDAATEELQRCVNDLGFVGALVNGFSQEGDGQTPLYYDLPQYRPFWGEVEKLDVPFYLHPRNPLPQDSRIYDGHPWLLGPTWAFAQETAVHALRLMASGLFDEHPRLNIILGHLGEGLPYMMYRIDHRIAWVKLPPRYPAKRRFMDYFNENFHITTSGNFRTQTLIDAILEIGADRILFSTDWPFENIDHATDWFNATSIAEADRVKIGRTNARRLFKLDGD

SEQ ID NO: 200 - protein, 328 aa, Artificial Sequence
  synthetic construct; Dicamba decarboxylase variant
MAQGKVALEEHFAIPETLQDSAGFVPGDYWKELQHRLLDIQDTRLRLMDAHGIETMILSLAAPAVQAIPDRRKAIEIARRANDMLAEECAKRPDRFLAFAALPLQDVDAASEELQRCVNDLGFVGALVNGFSQEGDGQTPLYYDLPQYRPFWGEVEKLDVPFYLHPRNPLPQDSRIYDGHPWLLGPTWAFAQETAVHALRLMASGLFDEHPRLNIILGHMGEGLPYMMYRIDHRIAWVHEPPRCPAKRRFMDYFNENFHITTSGNFRTQTLIDAILEIGADRILFSTDWPFENIDHAADWFNATSIAEADRVKIGRTNARRLFKLDGA

SEQ ID NO: 201 - protein, 328 aa, Artificial Sequence
  synthetic construct; Dicamba decarboxylase variant
MAQGKVALEEHFAIPETLQDSAGFVPGDYWKELQHRLLDIQDTRLKLMDAHGIETMILSLAAPAVQAIPDRRKAIEIARRANDFLAEECAKRPDRFLAFAALPLQDPDAATEELQRCVNDLGFVGALVNGFSVEGDGQTPLYYDLPQYRPFWGEVEKLDVPFYLHPRNPLPQDSRIYAGHPWLLGPTWAFAQETAVHALRLMASGLFDEHPRLNIILGHLGEGLPYMMYRIDHRIAWVKLPPRYPAKRRFMDYFNENFHITTSGNFRTQTLIDAILEIGADRILFSTDWPFENIDHAADWFNATSIAEADRVKIGRTNARRLFKLDGD

SEQ ID NO: 202 - protein, 328 aa, Artificial Sequence
  synthetic construct; Dicamba decarboxylase variant
MAQGKVALEEHFAIPETLQDSAGFVPGDYWKELQHRLLDIQDTRLKLMDAHGIETMILSLAAPGVQAIPDRRKAIEIARRANDFLAEECAKRPDRFLAFAALPLQDPDAATEELQRCVNDLGFVGALVNGFSQEGDGQTPLYYDLPQYRPFWGEVEKLDVPFYLHPRNPLPQDSRIYDGHPWLLGPTWAFAQETAVHALRLMASGLFDEHPRLNIILGHMGEGLPYMMYRIDHRIAWVHEPPRYPAKRRFMDYFNENFHITTSGNFRTQTLIDAILEIGADRILFSTDWPFENIDHAADWFNATSIAEADRLKIGRTNARRLFKLDLD

SEQ ID NO: 203 - protein, 328 aa, Artificial Sequence
  synthetic construct; Dicamba decarboxylase variant
MAQGKVALEEHFAIPETLQDSAGFVPGDYWKELQHRLLDIQDTRLKLMDAHGIETMILSLAAPAVQAIPDRRKAIEIARRANDFLAEECAKRPDRFLAFAALPLQDPDAATEELQRCVNDLGFVGALVNGFSVEGDGQTPLYYDLPQYRPFWGEVEKLDVPFYLHPRNPLPQDSRIYDGHPWLLGPTWAFAQETAVHALRLMASGLFDEHPRLNIILGHMGEGLPYMMYRIDHRIAWVHEPPRYPAKRRFMDYFLENFHITTSGNFRTQTLIDAILEIGADRILFSTDWPFENIDHAADWFNATSIAEADRLKIGRTNARRLFKLDGA

SEQ ID NO: 204 - protein, 328 aa, Artificial Sequence
  synthetic construct; Dicamba decarboxylase variant
MAQGKVALEEHFAIPETLQDSAGFVPGDYWKELQHRLLDIQDTRLKLMDAHGIETMILSLAAPAVQAIPDRVKAIEIARRANDMLAEECAKRPDRFLAFAALPLQDPDAATEELQRTVNDLGFVGALVNGFSQEGDGQTPLYYDLPQYRPFWGEVEKLDVPFYLHPRNPLPQDSRIYDGHPWLLGPTWAFAQETAVHALRLMASGLFDEHPRLNIILGHMGEGLPYMMYRIDHRIAWVHEPPRYPAKRRFMDYFNENFHITTSGNFRTQTLIDAILEIGADRILFSTDWPFENIDHAADWFNATSIAEADRLKIGRTNARRLFKLDGD

SEQ ID NO: 205 - protein, 328 aa, Artificial Sequence
  synthetic construct; Dicamba decarboxylase variant
MAQGKVALEEHFAIPETLNDSAGFVPGDYWKELQHRLLDIQDTRLKLMDAHGIETMILSLAAPAVQAIPDRRKAIEIARRANDFLAEECAKRPDRFLAFAALPLQDPDAATEELQRCVNDLGFVGALVNGFSQEGDGQTPLYYDLPQYRPFWGEVEKLDVPFYLHPRNPLPQDSRIYDGHPWLLGPTWAFAQETAVHALRLMASGLFDEHPRLNIILGHMGEGLPYMMYRIDHRIAWVHEPPRYPAKRRFMDYFNENFHITTSGNFRTQTLIDAILEIGADRILFSTDWPFENIDHAAAWFNATSIAEADRVKIGRTNARRLFKLDGD

SEQ ID NO: 206 - protein, 328 aa, Artificial Sequence
  synthetic construct; Dicamba decarboxylase variant
MAQGKVALEEHFAIPETLQDSAGFVPGDYWKELQHRLLDIQDTRLKLMDAHGIETMILSLAAPAVQAIPDRRKAIEIARRANDFLAEECAKRPDRFLAFAALPMQDVDAASEELQRCVNDLGFVGALVNGFSQEGDGQTPLYYDLPQYRPFWGEVEKLDVPFYLHPRNPLPQDSRIYDGHPWLLGPTWAFAQETAVHALRLMASGLFDEHPRLNIILGHLGEGLPYMMYRIDHRIAWVHEPPRYPAKRRFMDYFNENFHITTSGNFRTQTLIDAILEIGADRILFSTDWPFENIDHAAAWFNATSIAEADRLKIGRTNARRLFKLDLD

SEQ ID NO: 207 - protein, 328 aa, Artificial Sequence
  synthetic construct; Dicamba decarboxylase variant
MAQGKVALEEHFAIPETLQDSAGFVPGDYWKELQHRLLDIQDTRLKLMDAHGIETMILSLAAPAVQAIPDRRKAIEIARRANDFLAEECAKRPDRFLAFAALPLQDPDAATEELQRCVNDLGFVGALVNGFSVEGDGQTPLYYDLPQYRPFWGEVEKLDVPFYLHPRNPLPQDSRIYDGHPWLLGPTWAFAQETAVHALRLMASGLFDEHPRLNIILGHMGEGLPYMMYRIDHRIAWVHEPPRYPAKRRFMDYFNENFHITTSGNFRTQTLIDAILEIGADRILFSTDWPFENIDHAAAWFNATSIAEADRVKIGRTNARRLFKLDLD

SEQ ID NO: 208 - protein, 328 aa, Artificial Sequence
  synthetic construct; Dicamba decarboxylase variant
MAQGKVALEEHFAIPETLQDSAGFVPSDYLKELQHRLLDIQDTRLKLMDAHGIETMILSLAAPAVQAIPDRRKAIEIARRANDFLAEECAKRPDRFLAFAALPLQDPDAATEELQRCVNDLGFVGALVNGFSVEGDGQTPLYYDLPQYRPFWGEVEKLDVPFYLHPRNPLPQDSRIYDGHPWLLGPTWAFAQETAVHALRLMASGLFDEHPRLNIILGHLGEGLPYMMYRIDHRIAWVHEPPRYPAKRRFMDYFNENFHITTSGNFRTQTLIDAILEIGADRILFSTDWPFENIDHAADWFNATSIAEADRLKIGRTNARRLFKLDLD

SEQ ID NO: 209 - protein, 328 aa, Artificial Sequence
  synthetic construct; Dicamba decarboxylase variant
MAQGKVALEEHFAIPETLNDSAGFVPGDYWKELQHRLLDIQDTRLKLMDAHGIETMILSLAAPAVQAIPDRRKAIEIARRANDFLAEECAKRPDRFLAFAALPLQDPDAATEELQRTVNDLGFVGALVNGFSVEGDGQTPLYYDLPQYRPFWGEVEKLDVPFYLHPRNPLPQDSRIYDGHPWLLGPTWAFAQETAVHALRLMASGLFDEHPRLNIILGHMGEGLPYMMYRIDHRIAWVHEPPRYPAKRRFMDYFNENFHITTSGNFRTQTLIDAILEIGADRILFSTDWPFENIDHAADWFNATSIAEADRVKIGRTNARRLFKLDGD

SEQ ID NO: 210 - protein, 328 aa, Artificial Sequence
  synthetic construct; Dicamba decarboxylase variant
MAQGKVALEEHFAIPETLQDSAGFVPGDYWKELQHRLLDIQDTRLKLMDAHGIGTMILSLAAPAVQAIPDRRKAIEIARRANDFLAEECAKRPDRFLAFAALPLQDPDAATEELQRCVNDLGFVGALVNGFSVEGDGQTPLYYDLPQYRPFWGEVEKLDVPFYLHPRNPLPQDSRIYDGHPWLLGPTWAFAQETAVHALRLMASGLFDEHPRLNIILGHMGEGLPYMMYRIDHRIAWVKLPPRYPAKRRFMDYFNENFHITTSGNFRTQTLIDAILEIGADRILFSTDWPFENIDHAADWFNATSIAEADRVKIGRTNARRLFKLDGD

SEQ ID NO: 211 - protein, 328 aa, Artificial Sequence
  synthetic construct; Dicamba decarboxylase variant
MAQGKVALEEHFAIPETLQDSAGFVPGDYWKELQHRLLDIQDTRLKLMDAHGIETMILSLAAPAVQAIPDRVQAIEIARRANDFLAEECAKRPDRFLAFAALPLQDPDAATEELQRCVNDLGFVGALVNGFSQEGDGQTPLYYDLPQYRPFWGEVEKLDVPFYLHPRNPLPQDSRIYDGHPWLLGPTWAFAQETAVHALRLMASGLFDEHPRLNIILGHLGEGLPYMMYRIDHRIAWVKLPPRYPAKRRFMDYFNENFHITTSGNFRTQTLIDAILEIGADRILFSTDWPFENIDHAADWFNATSIAEADRVKIGRTNARRLFKLDGD

SEQ ID NO: 212 - protein, 328 aa, Artificial Sequence
  synthetic construct; Dicamba decarboxylase variant
MAQGKVALEEHFAIPETLQDSAGFVPCDYWKELQHRLLDIQDTRLHLMDAHGIETMILSLAAPAVQAIPDRRKAIEIARRANDFLAEECAKRPDRFLAFAALPLQDPDAATEELQRCVNDLGFVGALVNGFSQEGDGQTPLYYDLPQYRPFWGEVEKLDVPFYLHPRNPLPQDSRIYDGHPWLLGPTWAFAQETAVHALRLMASGLFDEHPRLNIILGHLGEGLPYMMYRIDHRIAWVQQPPRYPAKRRFMDYFNENFHITTSGNFRTQTLIDAILEIGADRILFSTDWPFENIDHATDWFNATSIAEADRVKIGRTNARRLFKLDGA

SEQ ID NO: 213 - protein, 328 aa, Artificial Sequence
  synthetic construct; Dicamba decarboxylase variant
MAQGKVALEEHFAIPETLQDSAGFVPSDYLKELQHRLLDIQDTRLKLMDAHGIETMILSLAAPAVQAIPDRRKAIEIARRANDFLAEECAKRPDRFLAFAALPMQDVDAATEELQRCVNTLGFVGALVNGFSQEGDGQTPLYYDLPQYRPFWGEVEKLDVPFYLHPRNPLPQDSRIYDGHPWLLGPTWAFAQETAVHALRLMASGLFDEHPRLNIILGHMGEGLPYMMYRIDHRIAWVHEPPRYPAKRRFMDYFNENFHITTSGNFRTQTLIDAILEIGADRILFSTDWPFENIDHAADWFNATSIAEADRLKIGRTNARRLFKLDGA

SEQ ID NO: 214 - protein, 328 aa, Artificial Sequence
  synthetic construct; Dicamba decarboxylase variant
MAQGKVALEEHFAIPETLQDSAGFVPGDYWKELQHRLLDIQDTRLKLMDAHGIGTMILSLAAPAVQAIPDRRKAIEIARRANDFLAEECAKRPDRFLAFAALPLQDPDAATEELQRCVNDLGFVGALVNGFSQEGDGQTPLYYDLPQYRPFWGEVEKLDVPFYLHPRNPLPQDSRIYDGHPWLLGPTWAFAQETAVHALRLMASGLFDEHPRLNIILGHMGEGLPYMMYRIDHRIAWVHEPPRYPAKRRFMDYFNENFHITTSGNFRTQTLIDAILEIGADRILFSTDWPFENIDHAADWFNATSIAEADRVKIGRTNARRLFKLDGA

SEQ ID NO: 215 - protein, 328 aa, Artificial Sequence
  synthetic construct; Dicamba decarboxylase variant
MAQGKVALEEHFAIPETLQDSAGFVPGDYWKELQHRLLDIQDTRLKLMDAHQIETMILSLAAPAVQAIPDRRKAIEIARRANDFLAEECAKRPDRFLAFAALPLQDPDAATEELQRCVNDLGFVGALVNGFSQEGDGQTPLYYDLPQYRPFWGEVEKLDVPFYLHPRNPLPQDSRIYDGHPWLLGPTWAFAQETAVHALRLMASGLFDEHPRLNIILGHMGEGLPYMMYRIDHRIAWVKLPPRYPAKRRFMDYFNENFHITTSGNFRTQTLIDAILEIGADRILFSTDWPFENIDHAADWFNATSIAEADRLKIGRTNARRLFKLDGD

SEQ ID NO: 216 - protein, 328 aa, Artificial Sequence
  synthetic construct; Dicamba decarboxylase variant
MAQGKVALEEHFAIPETLQDSAGFVPGDYWKELQHRLLDIQDTRLKLMDAHGIETMILSLAAPAVQAIPDRRKAIEIARRANDFLAEECAKRPDRFLAFAALPLQDPDAATEELQRCVNDLGFVGALVNGFSQEGDGQTPLYYDLPQYRPFWGEVEKLDVPFYLHPRNPLPQDSRIYDGHPWLLGPTWAFAQETAVHALRLMASGLFDEHPRLNIILGHMGEGLPYMMYRIDHRIAWVHEPPRYPAKRRFMDYFNENFHITTSGNFRTQTLIDAILEIGADRILFSTDWPFENIDHAAAWFNATSIAEADRVKIGRTNARRLFKLDGA

SEQ ID NO: 217 - protein, 328 aa, Artificial Sequence
  synthetic construct; Dicamba decarboxylase variant
MAQGKVALEEHFAIPETLQDSAGFVPSDYLKELQHRLLDIQDTRLKLMDAHGIETMILSLAAPAVQAIPDRRKAIEIARRANDFLAEECAKRPDRFLAFAALPMQDPDAATEELQRTVNDLGFVGALVNGFSVEGDGQTPLYYDLPQYRPFWGEVEKLDVPFYLHPRNPLPQDSRIYDGHPWLLGPTWAFAQETAVHALRLMASGLFDEHPRLNIILGHMGEGLPYMMYRIDHRIAWVHEPPRYPAKRRFMDYFNENFHITTSGNFRTQTLIDAILEIGADRILFSTDWPFENIDHAADWFNATSIAEADRVKIGRTNARRLFKLDGD

SEQ ID NO: 218 - protein, 328 aa, Artificial Sequence
  synthetic construct; Dicamba decarboxylase variant
MAQGKVALEEHFAIPETLQDSAGFVPGDYWKELQHRLLDIQDTRLKLMDAHGIETMILSLAAPAVQAIPDRRKAIEIARRANDFLAEECAKRPDRFLAFAALPLQDPDAATEELQRCVNDLGFVGALVNGFSQEGDGQTPLYYDLPQYRPFWGEVEKLDVPFYLHPRNPLPQDSRIYDGHPWLLGPTWAFAQETAVHALRLMASGLFDEHPRLNIILGHMGEGLPYMMYRIDHRIAWVHEPPRYPAKRRFMDYFNENFHITTSGNFRTQTLIDAILEIGADRILFSTDWPFENIDHAADWFNATSIAEADRVKIGRTNARRLFKLDGD

SEQ ID NO: 219 - protein, 328 aa, Artificial Sequence
  synthetic construct; Dicamba decarboxylase variant
MAQGKVALEEHFAIPETLQDSAGFVPSEYLKELQHRLLDIQDTRLKLMDAHGIETMILSLAAPAVQAIPDRRKAIEIARRANDFLAEECAKRPDRFLAFAALPMQDVDAASEELQRCVNTLGFVGALVNGFSQEGDGQTPLYYDLPQYRPFWGEVEKLDVPFYLHPRNPLPQDSRIYDGHPWLLGPTWAFAQETAVHALRLMASGLFDEHPRLNIILGHMGEGLPYMMYRIDHRIAWVHEPPRYPAKRRFMDYFNENFHITTSGNFRTQTLIDAILEIGADRILFSTDWPFENIDHAADWFNATSIAEADRVKIGRTNARRLFKLDLD

SEQ ID NO: 220 - protein, 328 aa, Artificial Sequence
  synthetic construct; Dicamba decarboxylase variant
MAQGKVALEEHFAIPETLNDSAGFVPGDYWKELQHRLLDIQDTRLKLMDAHGIETMILSLAAPAVQAIPDRVKAIEIARRANDFLAEECAKRPDRFLAFAALPLQDPDAATEELQRCVNTLGFVGALVNGFSQEGDGQTPLYYDLPQYRPFWGEVEKLDVPFYLHPRNPLPQDSRIYDGHPWLLGPTWAFAQETAVHALRLMASGLFDEHPRLNIILGHMGEGLPYMMYRIDHRIAWVHEPPRYPAKRRFMDYFNENFHITTSGNFRTQTLIDAILEIGADRILFSTDWPFENIDHAADWFNATSIAEADRVKIGRTNARRLFKLDGD

SEQ ID NO: 221 - protein, 328 aa, Artificial Sequence
  synthetic construct; Dicamba decarboxylase variant
MAQGKVALEEHFAIPETLQDSAGFVPGDYWKELQHRLLDIQDTRLKLMDAHGIETMILSLAAPAVQAIPDRRKAIEIARRANDFLAEECAKRPDRFLAFAALPLQDPDAATEELQRCVNTLGFVGALVNGFSQEGDGQTPLYYDLPQYRPFWGEVEKLDVPFYLHPRNPLPQDSRIYDGHPWLLGPTWAFAQETAVHALRLMASGLFDEHPRLNIILGHMGEGLPYMMYRIDHRIAWVKLPPRYPAKRRFMDYFNENFHITTSGNFRTQTLIDAILEIGADRILFSTDWPFENIDHAADWFNATSIAEADRLKIGRTNARRLFKLDGD

SEQ ID NO: 222 - protein, 328 aa, Artificial Sequence
  synthetic construct; Dicamba decarboxylase variant
MAQGKVALEEHFAIPETLQDSAGFVPGDYWKELQHRLLDIQDTRLRLMDAHGIETMILSLAAPAVQAIPDRRKAIEIARRANDFLAEECAKRPDRFLAFAALPLQDPDAATEELQRTVNTLGFVGALVNGFSQEGDGQTPLYYDLPQYRPFWGEVEKLDVPFYLHPRNPLPQDSRIYDGHPWLLGPTWAFAQETAVHALRLMASGLFDEHPRLNIILGHLGEGLPYMMYRIDHRIAWVHEPPRYPAKRRFMDYFNENFHITTSGNFRTQTLIDAILEIGADRILFSTDWPFENIDHAADWFNATSIAEADRVKIGRTNARRLFKLDGA

SEQ ID NO: 223 - protein, 328 aa, Artificial Sequence
  synthetic construct; Dicamba decarboxylase variant
MAQGKVALEEHFAIPETLQDSAGFVPSEYLKELQHRLLDIQDTRLKLMDAHGIETMILSLAAPAVQAIPDRRKAIEIARRANDFLAEECAKRPDRFLAFAALPLQDPDAATEELQRCVNDLGFVGALVNGFSVEGDGQTPLYYDLPQYRPFWGEVEKLDVPFYLHPRNPLPQDSRIYDGHPWLLGPTWAFAQETAVHALRLMASGLFDEHPRLNIILGHLGEGLPYMMYRIDHRIAWVKLPPRYPAKRRFMDYFNENFHITTSGNFRTQTLIDAILEIGADRILFSTDWPFENIDHAADWFNATSIAEADRVKIGRTNARRLFKLDGD

SEQ ID NO: 224 - protein, 328 aa, Artificial Sequence
  synthetic construct; Dicamba decarboxylase variant
MAQGKVALEEHFAIPETLQDSAGFVPGDYWKELQHRLLDIQDTRLKLMDAHGIETMILSLAAPAVQAIPDRRKAIEIARRANDMLAEECAKRPDRFLAFAALPLQDPDAATEELQRCVNDLGFVGALVNGFSQEGDGQTPLYYDLPQYRPFWGEVEKLDVPFYLHPRNPLPQDSRIYDGHPWLLGPTWAFAQETAVHALRLMASGLFDEHPRLNIILGHMGEGLPYMMYRIDHRIAWVKLPPRYPAKRRFMDYFNENFHITTSGNFRTQTLIDAILEIGADRILFSTDWPFENIDHATAWFNATSIAEADRVKIGRTNARRLFKLDGA

SEQ ID NO: 225 - protein, 328 aa, Artificial Sequence
  synthetic construct; Dicamba decarboxylase variant
MAQGKVALEEHFAIPETLQDSAGFVPGDYWKELQHRLLDIQDTRLRLMDAHGIETMILSLAAPAVQAIPDRRKAIEIARRANDFLAEECAKRPDRFLAFAALPLQDPDAATEELQRCVNDLGFVGALVNGFSQEGDGQTPLYYDLPQYRPFWGEVEKLDVPFYLHPRNPLPQDSRIYDGHPWLLGPTWAFAQETAVHALRLMASGLFDEHPRLNIILGHMGEGLPYMMYRIDHRIAWVKLPPRYPAKRRFMDYFNENFHITTSGNFRTQTLIDAILEIGADRILFSTDWPFENIDHAADWFNATSIAEADRLKIGRTNARRLFKLDGD

SEQ ID NO: 226 - protein, 328 aa, Artificial Sequence
  synthetic construct; Dicamba decarboxylase variant
MAQGKVALEEHFAIPETLQDSAGFVPGDYWKELQHRLLDIQDTRLKLMDAHGIGTMILSLAAPAVQAIPDRRKAIEIARRANDMLAEECAKRPDRFLAFAALPLQDPDAATEELQRCVNDLGFVGALVNGFSVEGDGQTPLYYDLPQYRPFWGEVEKLDVPFYLHPRNPLPQDSRIYDGHPWLLGPTWAFAQETAVHALRLMASGLFDEHPRLNIILGHLGEGLPYMMYRIDHRIAWVHEPPRYPAKRRFMDYFNENFHITTSGNFRTQTLIDAILEIGADRILFSTDWPFENIDHATDWFNATSIAEADRLKIGRTNARRLFKLDGA

SEQ ID NO: 227 - protein, 328 aa, Artificial Sequence
  synthetic construct; Dicamba decarboxylase variant
MAQGKVALEEHFAIPETLQDSAGFVPGDYWKELQHRLLDIQDTRLKLMDAHGIETMILSLAAPAVQAIPDRRKAIEIARRANDFLAEECAKRPDRFLAFAALPLQDPDAATEELQRCVNDLGFVGALVNGFSQEGDGQTPLYYDLPQYRPFWGEVEKLDVPFYLHPRNPLPQDSRIYDGHPWLLGPTWAFAQETAVHALRLMASGLFDEHPRLNIILGHMGEGLPYMMYRIDHRIAWVHEPPRYPAKRRFMDYFNENFHITTSGNFRTQTLIDAILEIGADRILFSTDWPFENIDHAAAWFNATSIAEADRLKIGRTNARRLFKLDGD

SEQ ID NO: 228 - protein, 328 aa, Artificial Sequence
  synthetic construct; Dicamba decarboxylase variant
MAQGKVALEEHFAIPETLQDSAGFVPGDYWKELQHRLLDIQDTRLKLMDAHGIETMILSLAAPAVQAIPDRRKAIEIARRANDFLAEECAKRPDRFLAFAALPLQDPDAATEELQRCVNDLGFVGALVNGFSVEGDGQTPLYYDLPQYRPFWGEVEKLDVPFYLHPRNPLPQDSRIYDGHPWLLGPTWAFAQETAVHALRLMASGLFDEHPRLNIILGHLGEGLPYMMYRIDHRIAWVKLPPRYPAKRRFMDYFNENFHITTSGNFRTQTLIDAILEIGADRILFSTDWPFENIDHAADWFNATSIAEADRVKIGRTNARRLFKLDGD

SEQ ID NO: 229 - protein, 328 aa, Artificial Sequence
  synthetic construct; Dicamba decarboxylase variant
MAQGKVALEEHFAIPETLQDSAGFVPGDYWKELQHRLLDIQDTRLKLMDAHGIETMILSLAAPAVQAIPDRRKAIEIARRANDFLAEECAKRPDRFLAFAALPLQDVDAATEELQRCVNDLGFVGALVNGFSQEGDGQTPLYYDLPQYRPFWGEVEKLDVPFYLHPRNPLPQDSRIYDGHPWLLGPTWAFAQETAVHALRLMASGLFDEHPRLNIILGHMGEGLPYMMYRIDHRIAWVKLPPRYPAKRRFMDYFNENFHITTSGNFRTQTLIDAILEIGADRILFSTDWPFENIDHATDWFNATSIAEADRVKIGRTNARRLFKLDLD

SEQ ID NO: 230 - protein, 328 aa, Artificial Sequence
  synthetic construct; Dicamba decarboxylase variant
MAQGKVALEEHFAIPETLQDSAGFVPSEYLKELQHRLLDIQDTRLKLMDAHGIETMILSLAAPAVQAIPDRRKAIEIARRANDFLAEECAKRPDRFLAFAALPLQDPDAATEELQRCVNDLGFVGALVNGFSQEGDGQTPLYYDLPQYRPFWGEVEKLDVPFYLHPRNPLPQDSRIYDGHPWLLGPTWAFAQETAVHALRLMASGLFDEHPRLNIILGHLGEGLPYMMYRIDHRIAWVKLPPRYPAKRRFMDYFNENFHITTSGNFRTQTLIDAILEIGADRILFSTDWPFENIDHAAAWFNATSIAEADRVKIGRTNARRLFKLDGD

SEQ ID NO: 231 - protein, 328 aa, Artificial Sequence
  synthetic construct; Dicamba decarboxylase variant
MAQGKVALEEHFAIPETLQDSAGFVPGDYWKELQHRLLDIQDTRLKLMDAHGIETMILSLAAPAVQAIPDRRKAIEIARRANDFLAEECAKRPDRFLAFAALPLQDPDAATEELQRCVNNLGFVGALVNGFSQEGDGQTPLYYDLPQYRPFWGEVEKLDVPFYLHPRNPLPQDSRIYDGHPWLLGPTWAFAQETAVHALRLMASGLFDEHPRLNIILGHLGEGLPYMMYRIDHRIAWVHEPPRYPAKRRFMDYFNENFHITTSGNFRTQTLIDAILEIGADRILFSTDWPFENIDHAADWFNATSIAEADRVKIGRTNARRLFKLDGA

SEQ ID NO: 232 - protein, 328 aa, Artificial Sequence
  synthetic construct; Dicamba decarboxylase variant
MAQGKVALEEHFAIPETLQDSAGFVPGDYWKELQHRLLDIQDTRLKLMDAHGIGTMILSLAAPAVQAIPDRRKAIEIARRANDFLAEECAKRPDRFLAFAALPMQDPDAATEELQRCVNDLGFVGALVNGFSVEGDGQTPLYYDLPQYRPFWGEVEKLDVPFYLHPRNPLPQDSRIYDGHPWLLGPTWAFAQETAVHALRLMASGLFDEHPRLNIILGHMGEGLPYMMYRIDHRIAWVHEPPRYPAKRRFMDYFNENFHITTSGNFRTQTLIDAILEIGADRILFSTDWPFENIDHAADWFNATSIAEADRVKIGRTNARRLFKLDLD

SEQ ID NO: 233 - protein, 328 aa, Artificial Sequence
  synthetic construct; Dicamba decarboxylase variant
MAQGKVALEEHFAIPETLQDSAGFVPGDYWKELQHRLLDIQDTRLKLMDAHGIETMVLSLAAPAVQAIPDRRKAIEIARRANDMLAEECAKRPDRFLAFAALPMQDPDAATEELQRCVNDLGFVGALVNGFSQEGDGQTPLYYDLPQYRPFWGEVEKLDVPFYLHPRNPLPQDSRIYDGHPWLLGPTWAFAQETAVHALRLMASGLFDEHPRLNIILGHMGEGLPYMMYRIDHRIAWVHEPPRYPAKRRFMDYFNENFHITTSGNFRTQTLIDAILEIGADRILFSTDWPFENIDHAADWFNATSIAEADRVKIGRTNARRLFKLDGD

SEQ ID NO: 234 - protein, 328 aa, Artificial Sequence
  synthetic construct; Dicamba decarboxylase variant
MAQGKVALEEHFAIPETLNDSAGFVPGDYWKELQHRLLDIQDTRLKLMDAHGIETMILSLAAPAVQAIPDRRKAIEIARRANDFLAEECAKRPDRFLAFAALPLQDPDAATEELQRTVNTLGFVGALVNGFSQEGDGQTPLYYDLPQYRPFWGEVEKLDVPFYLHPRNPLPQDSRIYDGHPWLLGPTWAFAQETAVHALRLMASGLFDEHPRLNIILGHMGEGLPYMMYRIDHRIAWVHEPPRYPAKRRFMDYFNENFHITTSGNFRTQTLIDAILEIGADRILFSTDWPFENIDHAADWFNATSIAEADRVKIGRTNARRLFKLDCD

SEQ ID NO: 235 - protein, 328 aa, Artificial Sequence
  synthetic construct; Dicamba decarboxylase variant
MAQGKVALEEHFAIPETLQDSAGFVPGDYWKELQHRLLDIQDTRLKLMDAHGIETMILSLAAPAVQAIPDRRKAIEIARRANDMLAEECAKRPDRFLAFAALPLQDPDAATEELQRTVNDLGFVGALVNGFSQEGDGQTPLYYDLPQYRPFWGEVEKLDVPFYLHPRNPLPQDSRIYDGHPWLLGPTWAFAQETAVHALRLMASGLFDEHPRLNIILGHLGEGLPYMMYRIDHRIAWVHEPPRYPAKRRFMDYFNENFHITTSGNFRTQTLIDAILEIGADRILFSTDWPFENIDHAADWFNATSIAEADRVKIGRTNARRLFKLDGD

SEQ ID NO: 236 - protein, 328 aa, Artificial Sequence
  synthetic construct; Dicamba decarboxylase variant
MAQGKVALEEHFAIPETLQDSAGFVPGDYWKELQHRLLDIQDTRLKLMDAHGIETMILSLAAPAVQAIPDRRKAIEIARRANDFLAEECAKRPDRFLAFAALPLQDPDAATEELQRTVNDLGFVGALVNGFSQEGDGQTPLYYDLPQYRPFWGEVEKLDVPFYLHPRNPLPQDSRIYDGHPWLLGPTWAFAQETAVHALRLMASGLFDEHPRLNIILGHMGEGLPYMMYRIDHRIAWVHEPPRYPAKRRFMDYFNENFHITTSGNFRTQTLIDAILEIGADRILFSTDWPFENIDHAADWFNATSIAEADRVKIGRTNARRLFKLDGA

SEQ ID NO: 237 - protein, 328 aa, Artificial Sequence
  synthetic construct; Dicamba decarboxylase variant
MAQGKVALEEHFAIPETLQDSAGFVPGDYWKELQHRLLDIQDTRLKLMDAHGIETMVLSLAAPAVQAIPDRRKAIEIARRANDFLAEECAKRPDRFLAFAALPLQDPDAATEELQRCVNDLGFVGALVNGFSQEGDGQTPLYYDLPQYRPFWGEVEKLDVPFYLHPRNPLPQDSRIYDGHPWLLGPTWAFAQETAVHALRLMASGLFDEHPRLNIILGHLGEGLPYMMYRIDHRIAWVKLPPRYPAKRRFMDYFNENFHITTSGNFRTQTLIDAILEIGADRILFSTDWPFENIDHATAWFNATSIAEADRVKIGRTNARRLFKLDGA

SEQ ID NO: 238 - protein, 328 aa, Artificial Sequence
  synthetic construct; Dicamba decarboxylase variant
MAQGKVALEEHFAIPETLQDSAGFVPGDYWKELQHRLLDIQDTRLKLMDAHGIETMILSLAAPAVQAIPDRRKAIEIARRANDFLAEECAKRPDRFLAFAALPLQDPDAATEELQRCVNDLGFVGALVNGFSVEGDGQTLLYYDLPQYRPFWGEVEKLDVPFYLHPRNPLPQDSRIYDGHPWLLGPTWAFAQETAVHALRLMASGLFDEHPRLNIILGHLGEGLPYMMYRIDHRIAWVHPPPRYPAKRRFMDYFNENFHITTSGNFRTQTLIDAILEIGADRILFSTDWPFENIDHAADWFNATSIAEADRLKIGRTNARRLFKLDGA

SEQ ID NO: 239 - protein, 328 aa, Artificial Sequence
  synthetic construct; Dicamba decarboxylase variant
MAQGKVALEEHFAIPETLQDSAGFVPGDYWKELQHRLLDIQDTRLKLMDAHQIGTMILSLAAPAVQAIPDRRKAIEIARRANDFLAEECAKRPDRFLAFAALPLQDPDAATEELQRCVNDLGFVGALVNGFSQEGDGQTPLYYDLPQYRPFWGEVEKLDVPFYLHPRNPLPQDSRIYDGHPWLLGPTWAFAQETAVHALRLMASGLFDEHPRLNIILGHMGEGLPYMMYRIDHRIAWVHEPPRYPAKRRFIDYFNENFHITTSGNFRTQTLIDAILEIGADRILFSTDWPFENIDHAADWFNATSIAEADRVKIGRTNARRLFKLDLD

SEQ ID NO: 240 - protein, 328 aa, Artificial Sequence
  synthetic construct; Dicamba decarboxylase variant
MAQGKVALEEHFAIPETLQDSAGFVPGDYWKELQHRLLDIQDTRLKLMDAHGIETMILSLAAPAVQAIPDRRKAIEIARRANDFLAEECAKRPDRFLAFAALPLQDVDAASEELQRCVNDLGFVGALVNGFSQEGDGQTPLYYDLPQYRPFWGEVEKLDVPFYLHPRNPLPQDSRIYDGHPWLLGPTWAFAQETAVHALRLMASGLFDEHPRLNIILGHMGEGLPYMMYRIDHRIAWVHEPPRYPAKRRFMDYFNENFHITTSGNFRTQTLIDAILEIGADRILFSTDWPFENIDHAADWFNATSIAEADRVKIGRTNARRLFKLDGA

SEQ ID NO: 241 - protein, 328 aa, Artificial Sequence
  synthetic construct; Dicamba decarboxylase variant
MAQGKVALEEHFAIPETLQDSAGFVPGDYWKELQHRLLDIQDTRLRLMDAHGIETMILSLAAPAVQAIPDRRKAIEIARRANDFLAEECAKRPDRFLAFAALPLQDVDAASEELQRCVNTLGFVGALVNGFSQEGDGQTPLYYDLPQYRPFWGEVEKLDVPFYLHPRNPLPQDSRIYDGHPWLLGPTWAFAQETAVHALRLMASGLFDEHPRLNIILGHMGEGLPYMMYRIDHRIAWVHEPPRYPAKRRFMDYFNENFHITTSGNFRTQTLIDAILEIGADRILFSTDWPFENIDHAADWFNATSIAEADRVKIGRTNARRLFKLDGD

SEQ ID NO: 242 - protein, 328 aa, Artificial Sequence
  synthetic construct; Dicamba decarboxylase variant
MAQGKVALEEHFAIPETLQDSAGFVPGDYWKELQHRLLDIQDTRLKLMDAHGIETMILSLAAPAVQAIPDRRKAIEIARRANDFLAEECAKRPDRFLAFAALPLQDPDAATEELQRCVNDLGFVGALVNGFSVEGDGQTPLYYDLPQYRPFWGEVEKLDVPFYLHPRNPLPQDSRIYDGHPWLLGPTWAFAQETAVHALRLMASGLFDEHPRLNIILGHMGEGLPYMMYRIDHRIAWVKLPPRYPAKRRFMDYFNENFHITTSGNFRTQTLIDAILEIGADRILFSTDWPFENIDHAADWFNATSIAEADRLKIGRTNARRLFKLDGA

SEQ ID NO: 243 - protein, 328 aa, Artificial Sequence
  synthetic construct; Dicamba decarboxylase variant
MAQGKVALEEHFAIPETLQDSAGFVPGDYWKELQHRLLDIQDTRLKLMDAHGIETMILSLAAPAVQAIPDRRKAIEIARRANDFLAEECAKRPDRFLAFAALPMQDVDAATEELQRCVNDLGFVGALVNGFSVEGDGQTPLYYDLPQYRPFWGEVEKLDVPFYLHPRNPLPQDSRIYDGHPWLLGPTWAFAQETAVHALRLMASGLFDEHPRLNIILGHMGEGLPYMMYRIDHRIAWVHEPPRYPAKRRFMDYFNENFHITTSGNFRTQTLIDAILEIGADRILFSTDWPFENIDHATDWFNATSIAEADRVKIGRTNALRLFKLDGA

SEQ ID NO: 244 - protein, 328 aa, Artificial Sequence
  synthetic construct; Dicamba decarboxylase variant
MAQGKVALEEHFAIPETLQDSAGFVPGDYWKELQHRLLDIQDTRLKLMDAHGIETMILSLAAPAVQAIPDRRKAIEIARRANDFLAEECAKRPDRFLAFAALPMQDPDAATEELQRCVNNLGFVGALVNGFSQEGDGQTPLYYDLPQYRPFWGEVEKLDVPFYLHPRNPLPQDSRIYDGHPWLLGPTWAFAQETAVHALRLMASGLFDEHPRLNIILGHMGEGLPYMMYRIDHRIAWVKLPPRYPAKRRFMDYFNENFHITTSGNFRTQTLIDAILEIGADRILFSTDWPFENIDHAADWFNATSIAEADRVKIGRTNARRLFKLDGD

SEQ ID NO: 245 - protein, 328 aa, Artificial Sequence
  synthetic construct; Dicamba decarboxylase variant
MAQGKVALEEHFAIPETLQDSAGFVPGDYWKELQHRLLDIQDTRLKLMDAHGIETMILSLAAPAVQAIPDRRKAIEIARRANDMLAEECAKRPDRFLAFAALPLQDPDAATEELQRTVNDLGFVGALVNGFSQEGDGQTPLYYDLPQYRPFWGEVEKLDVPFYLHPRNPLPQDSRIYDGHPWLLGPTWAFAQETAVHALRLMASGLFDEHPRLNIILGHLGEGLPYMMYRIDHRIAWVHPPPRYPAKRRFMDYFNENFHITTSGNFRTQTLIDAILEIGADRILFSTDWPFENIDHAADWFNATSIAEADRVKIGRTNARRLFKLDGA

SEQ ID NO: 246 - protein, 328 aa, Artificial Sequence
  synthetic construct; Dicamba decarboxylase variant
MAQGKVALEEHFAIPETLQDSAGFVPGDYWKELQHRLLDIQDTRLKLMDAHGIETMILSLAAPAVQAIPDRRKAIEIARRANDMLAEECAKRPDRFLAFAALPLQDPDAATEELQRCVNDLGFVGALVNGFSQEGDGQTPLYYDLPQYRPFWGEVEKLDVPFYLHPRNPLPQDSRIYDGHPWLLGPTWAFAQETAVHALRLMASGLFDEHPRLNIILGHMGEGLPYMMYRIDHRIAWVHEPPRYPAKRRFMDYFNENFHITTSGNFRTQTLIDAILEIGADRILFSTDWPFENIDHAADWFNATSIAEADRVKIGRTNARRLFKLDGA

SEQ ID NO: 247 - protein, 328 aa, Artificial Sequence
  synthetic construct; Dicamba decarboxylase variant
MAQGKVALEEHFAIPETLQDSAGFVPGDYWKELQHRLLDIQDTRLRLMDAHGIETMILSLAAPAVQAIPDRRKAIEIARRANDFLAEECAKRPDRFLAFAALPLQDVDAATEELQRCVNDLGFVGALVNGFSVEGDGQTPLYYDLPQYRPFWGEVEKLDVPFYLHPRNPLPQDSRIYDGHPWLLGPTWAFAQETAVHALRLMASGLFDEHPRLNIILGHMGEGLPYMMYRIDHRIAWVKLPPRYPAKRRFMDYFNENFHITTSGNFRTQTLIDAILEIGADRILFSTDWPFENIDHAADWFNATSIAEADRVKIGRTNARRLFKLDGA

SEQ ID NO: 248 - protein, 328 aa, Artificial Sequence
  synthetic construct; Dicamba decarboxylase variant
MAQGKVALEEHFAIPETLQDSAGFVPSEYLKELQHRLLDIQDTRLKLMDAHGIETMILSLAAPAVQAIPDRRKAIEIARRANDFLAEECAKRPDRFLAFAALPLQDPDAATEELQRTVNTLGFVGALVNGFSVEGDGQTPLYYDLPQYRPFWGEVEKLDVPFYLHPRNPLPQDSRIYDGHPWLLGPTWAFAQETAVHALRLMASGLFDEHPRLNIILGHMGEGLPYMMYRIDHRIAWVHEPPRYPAKRRFMDYFNENFHITTSGNFRTQTLIDAILEIGADRILFSTDWPFENIDHAADWFNATSIAEADRVKIGRTNARRLFKLDLD

SEQ ID NO: 249 - protein, 328 aa, Artificial Sequence
  synthetic construct; Dicamba decarboxylase variant
MAQGKVALEEHFAIPETLQDSAGFVPGDYWKELQHRLLDIQDTRLKLMDAHRIETMILSLAAPAVQAIPDRRKAIEIARRANDILAEECAKRPDRFLAFAALPMQDVDAATEELQRCVNDLGFVGALVNGFSQEGDGQTPLYYDLPQYRPFWGEVEKLDVPFYLHPRNPLPQDSRIYDGHPWLLGPTWAFAQETAVHALRLMASGLFDEHPRLNIILGHMGEGLPYMMYRIDHRIAWVHQPPRYPAKRRFMDYFNENFHITTSGNFRTQTLIDAILEIGADRILFSTDWPFENIDHAADWFNATSIAEADRVKIGRTNARRLFKLDGD

SEQ ID NO: 250 - protein, 328 aa, Artificial Sequence
  synthetic construct; Dicamba decarboxylase variant
MAQGKVALEEHFAIPETLQDSAGFVPGDYWKELQHRLLDIQDTRLKLMDAHGIETMILSLAAPAVQAIPDRRKAIEIARRANDMLAEECAKRPDRFLAFAALPLQDPDAATEELQRCVNDLGFVGALVNGFSQEGDGQTPLYYDLPQYRPFWGEVEKLDVPFYLHPRNPLPQDSRIYDGHPWLLGPTWAFAQETAVHALRLMASGLFDEHPRLNIILGHMGEGLPYMMYRIDHRIAWVHEPPRYPAKRRFMDYFNENFHITTSGNFRTQTLIDAILEIGADRILFSTDWPFENIDHAADWFNATSIAEADRVKIGRTNARRLFKLDGD

SEQ ID NO: 251 - protein, 328 aa, Artificial Sequence
  synthetic construct; Dicamba decarboxylase variant
MAQGKVALEEHFAIPETLQDSAGFVPGDYWKELQHRLLDIQDTRLKLMDAHGIDTMILSLAAPGVQAIPDRRKAIEIARRANDILAEECAKRPDRFLAFAALPLQDPDAATEELQRCVNDLGFVGALVNGFSQEGDGQTPLYYDLPQYRPFWGEVEKLDVPFYLHPRNPLPQDSRIYDGHPWLLGPTWAFAQETAVHALRLMASGLFDEHPRLNIILGHMGEGLPYMMYRIDHRIAWVQEPPRYPAKRRFMDYFNENFHITTSGNFRTQTLIDAILEIGADRILFSTDWPFENIDHAADWFNATSIAEADRVKIGRTNARRLFKLDLD

SEQ ID NO: 252 - protein, 328 aa, Artificial Sequence
  synthetic construct; Dicamba decarboxylase variant
MAQGKVALEEHFAIPETLQDSAGFVPGDYWKELQHRLLDIQDTRLRLMDAHGIGTMILSLAAPGVQAIPDRRKAIEIARRANDFLAEECAKRPDRFLAFAALPLQDVDAASEELQRCVNDLGFVGALVNGFSQEGDGQTPLYYDLPQYRPFWGEVEKLDVPFYLHPRNPLPQDSRIYDGHPWLLGPTWAFAQETAVHALRLMASGLFDEHPRLNIILGHMGEGLPYMMYRIDHRIAWVKLPPRYPAKRRFMDYFNENFHITTSGNFRTQTLIDAILEIGADRILFSTDWPFENIDHAADWFNATSIAEADRVKIGRTNARRLFKLDGA

SEQ ID NO: 253 - protein, 328 aa, Artificial Sequence
  synthetic construct; Dicamba decarboxylase variant
MAQGKVALEEHFAIPETLQDSAGFVPGDYWKELQHRLLDIQDTRLKLMDAHGIETMILSLAAPAVQAIPDRVKAIEIARRANDFLAEECAKRPDRFLAFAALPLQDPDAATEELQRCVNDLGFVGALVNGFSQEGDGQTPLYYDLPQYRPFWGEVEKLDVPFYLHPRNPLPQDSRIYDGHPWLLGPTWAFAQETAVHALRLMASGLFDEHPRLNIILGHMGEGLPYMMYRIDHRIAWVKLPPRYPAKRRFMDYFNENFHITTSGNFRTQTLIDAILEIGADRILFSTDWPFENIDHAADWFNATSIAEADRVKIGRTNARRLFKLDGD

SEQ ID NO: 254 - protein, 328 aa, Artificial Sequence
  synthetic construct; Dicamba decarboxylase variant
MAQGKVALEEHFAIPETLQDSAGFVPGDYWKELQHRLLDIQDTRLKLMDAHGIETMILSLAAPAVQAIPDRRQAIEIARRANDFLAEECAKRPDRFLAFAALPLQDPDAASEELQRCVNDLGFVGALVNGFSVEGDGQTPLYYDLPQYRPFWGEVEKLDVPFYLHPRNPLPQDSRIYDGHPWLLGPTWAFAQETAVHALRLMASGLFDEHPRLNIILGHLGEGLPYMMYRIDHRIAWVHPPPRYPAKRRFMDYFNENFHITTSGNFRTQTLIDAILEIGADRILFSTDWPFENIDHAADWFNATSIAEADRVKIGRTNARRLFKLDGA

SEQ ID NO: 255 - protein, 328 aa, Artificial Sequence
  synthetic construct; Dicamba decarboxylase variant
MAQGKVALEEHFAIPETLQDSAGFVPGDYWKELQHRLLDIQDTRLRLMDAHGIETMILSLAAVGVQAIPDRRKAIEIARRANDFLAEECAKRPDRFLAFAALPLQDPDAATEELQRCVNDLGFVGALVNGFSQEGDGQTPLYYDLPQYRPFWGEVEKLDVPFYLHPRNPLPQDSRIYDGHPWLLGPTWAFAQETAVHALRLMASGLFDEHPRLNIILGHMGEGLPYMMYRIDHRIAWVHPPPRYPAKRRSMDYFNENFHITTSGNFRTQTLIDAILEIGADRILFSTDWPFENIDHAADWFNATSIAEADRVKIGRTNARRLFKLDGD

SEQ ID NO: 256 - protein, 328 aa, Artificial Sequence
  synthetic construct; Dicamba decarboxylase variant
MAQGKVALEEHFAIPETLQDSAGFVPGDYWKELQHRLLDIQDTRLNLMDAHGIETMILSLAAPAVQAIPDRRKAIEIARRANDFLAEECAKRPDRFLAFAALPLQDPDAATEELQRCVNDLGFVGALVNGFSQEGDGQTPLYYDLPQYRPFWGEVEKLDVPFYLHPRNPLPQDSRIYDGHPWLLGPTWAFAQETAVHALRLMASGLFDEHPRLNIILGHMGEGLPYMMYRIDHRIAWVHEPPRYPAKRRFMDYFNENFHITTSGNFRTQTLIDAILEIGADRILFSTDWPFENIDHAADWFNATSIAEADRVKIGRTNARRLFKLDVD

SEQ ID NO: 257 - protein, 328 aa, Artificial Sequence
  synthetic construct; Dicamba decarboxylase variant
MAQGKVALEEHFAIPETLQDSAGFVPGDYWKELQHRLLDIQDTRLKLMDAHGIETMILSLAAPAVQAIPDRRKAIEIARRANDFLAEECAKRPDRFLAFAALPLQDVDAATEELQRCVNDLGFVGALVNGFSVEGDGQTPLYYDLPQYRPFWGEVEKLDVPFYLHPRNPLPQDSRIYDGHPWLLGPTWAFAQETAVHALRLMASGLFDEHPRLNIILGHMGEGLPYMMYRIDHRIAWVHEPPRYPAKRRFMDYFLENFHITTSGNFRTQTLIDAILEIGADRILFSTDWPFENIDHAADWFNATSIAEADRVKIGRTNARRLFKLDLD

SEQ ID NO: 258 - protein, 328 aa, Artificial Sequence
  synthetic construct; Dicamba decarboxylase variant
MAQGKVALEEHFAIPETLQDSAGFVPGDYWKELQHRLLDIQDTRLRLMDAHGIETMILSLAAPAVQAIPDRRKAIEIARRANDFLAEECAKRPDRFLAFAALPLQDPDAATEELQRTVNDLGFVGALVNGFSQEGDGQTPLYYDLPQYRPFWGEVEKLDVPFYLHPRNPLPQDSRIYDGHPWLLGPTWAFAQETAVHALRLMASGLFDEHPRLNIILGHMGEGLPYMMYRIDHRIAWVHEPPRYPAKRRFMDYFNENFHITTSGNFRTQTLIDAILEIGADRILFSTDWPFENIDHAADWFNATSIAEADRVKIGRTNARRLFKLDGA

SEQ ID NO: 259 - protein, 328 aa, Artificial Sequence
  synthetic construct; Dicamba decarboxylase variant
MAQGKVALEEHFAIPETLQDSAGFVPSEYLKELQHRLLDIQDTRLKLMDAHGIETMILSLAAPAVQAIPDRRKAIEIARRANDFLAEECAKRPDRFLAFAALPMQDPDAATEELQRCVNDLGFVGALVNGFSVEGDGQTPLYYDLPQYRPFWGEVEKLDVPFYLHPRNPLPQDSRIYDGHPWLLGPTWAFAQETAVHALRLMASGLFDEHPRLNIILGHMGEGLPYMMYRIDHRIAWVHEPPRYPAKRRFMDYFNENFHITTSGNFRTQTLIDAILEIGADRILFSTDWPFENIDHATAWFNATSIAEADRVKIGRTNARRLFKLDGD

SEQ ID NO: 260 - protein, 326 aa, Artificial Sequence
  synthetic construct; Dicamba decarboxylase variant
MAQGKVALEEHFAIPETLQDSAGFVPGDYWKELQHRLLDIQDTRLKLMDAHGIETMILSLAAPAVQAIPDRRKAIEIARRANDFLAEECAKRPDRFLAFAALPMQDPDAASEELQRCVNDLGFVGALVNGFSVEGDGQTPLYYDLPQYRPFWGEVEKLDVPFYLHPRNPLPQDSRIYDGHPWLLGPTWAFAQETAVHALRLMASGLFDEHPRLNIILGHLGEGLPYMMYRIDHRIAWVKLPPRYPAKRRFMDYFNENFHITTSGNFRTQTLIDAILEIGADRILFSTDWPFENIDHAADWFNATSIAEADRVKIGRTNAPSSVQTG

SEQ ID NO: 261 - protein, 328 aa, Artificial Sequence
  synthetic construct; Dicamba decarboxylase variant
MAQGKVALEEHFAIPETLQDSAGFVPGDYWKELQHRLLDIQDTRLKLMDAHGIETMILSLAAPAVQAIPDRVEAIEIARRANDFLAEECAKRPDRFLAFAALPLQDPDAATEELQRCVNDLGFVGALVNGFSQEGDGQTPLYYDLPQYRPFWGEVEKLDVPFYLHPRNPLPQDSRIYDGHPWLLGPTWAFAQETAVHALRLMASGLFDEHPRLNIILGHMGEGLPYMMYRIDHRIAWVHEPPRYPAKRRFMDYFNENFHITTSGNFRTQTLIDAILEIGADRILFSTDWPFENIDHAADWFNATSIAEADRVKIGRTNARRLFKLDGA

SEQ ID NO: 262 - protein, 328 aa, Artificial Sequence
  synthetic construct; Dicamba decarboxylase variant
MAQGKVALEEHFAIPETLNDSAGFVPGDYWKELQHRLLDIQDTRLKLMDAHGIETMILSLAAPAVQAIPDRRKAIEIARRANDFLAEECAKRPDRFLAFAALPLQDPDAATEELQRCVNDLGFVGALVNGFSQEGDGQTPLYYDLPQYRPFWGEVEKLDVPFYLHPRNPLPQDSRIYDGHPWLLGPTWAFAQETAVHALRLMASGLFDEHPRLNIILGHLGEGLPYMMYRIDHRIAWVHPPPRYPAKRRFMDYFNENFHITTSGNFRTQTLIDAILEIGADRILFSTDWPFENIDHATDWFNATSIAEADRVKIGRTNARRLFKLDGD

SEQ ID NO: 263 - protein, 328 aa, Artificial Sequence
  synthetic construct; Dicamba decarboxylase variant
MAQGKVALEEHFAIPATLNDSAGFVPGDYWKELQHRLLDIQDTRLKLMDAHGIGTMILSLAAPAVQAIPDRRKAIEIARRANDFLAEECAKRPDRFLAFAALPLQDPDAASEELQRCVNDLGFVGALVNGFSVEGDGQTPLYYDLPQYRPFWGEVEKLDVPFYLHPRNPLPQDSRIYDGHPWLLGPTWAFAQETAVHALRLMASGLFDEHPRLNIILGHMGEGLPYMMYRIDHRIAWVHEPPRYPAKRRFMDYFLENFHITTSGNFRTQTLIDAILEIGADRILFSTDWPFENIDHAADWFNATSIAEADRVKIGRTNARRLFKLDGD

SEQ ID NO: 264 - protein, 328 aa, Artificial Sequence
  synthetic construct; Dicamba decarboxylase variant
MAQGKVALEEHFAIPETLQDSAGFVPGDYWKELQHRLLDIQDTRLKLMDAHGIETMILSLAAPAVQAIPDRRKAIEIARRANDFLAEECAKRPDRFLAFAALPLQDPDAATEELQRCVNTLGFVGALVNGFSVEGDGQTPLYYDLPQYRPFWGEVEKLDVPFYLHPRNPLPQDSRIYDGHPWLLGPTWAFAQETAVHALRLMASGLFDEHPRLNIILGHMGEGLPYMMYRIDHRIAWVHEPPRYPAKRRFMDYFNENFHITTSGNFRTQTLIDAILEIGADRILFSTDWPFENIDHAADWFNATSIAEADRLKIGRTNARRLFKLDGD

SEQ ID NO: 265 - protein, 328 aa, Artificial Sequence
  synthetic construct; Dicamba decarboxylase variant
MAQGKVALEEHFAIPETLNDSAGFVPGDYWKELQHRLLDIQDTRLKLMDAHGIETMILSLAAPAVQAIPDRRKAIEIARRANDFLAEECAKRPDRFLAFAALPLQDPDAATEELQRTVNDLGFVGALVNGFSQEGDGQTPLYYDLPQYRPFWGEVEKLDVPFYLHPRNPLPQDSRIYDGHPWLLGPTWAFAQETAVHALRLMASGLFDEHPRLNIILGHMGEGLPYMMYRIDHRIAWVKLPPRYPAKRRFMDYFNENFHITTSGNFRTQTLIDAILEIGADRILFSTDWPFENIDHAADWFNATSIAEADRLKIGRTNARRLFKLDLD

SEQ ID NO: 266 - protein, 328 aa, Artificial Sequence
  synthetic construct; Dicamba decarboxylase variant
MAQGKVALEEHFAIPETLQDSAGFVPGDYWKELQHRLLDIQDTRLKLMDAHGIETMILSLAAPAVQAIPDRRKAIEIARRANDFLAEECAKRPDRFLAFAALPLQDPDAATEELQRCVNTLGFVGALVNGFSQEGDGQTPLYYDLPQYRPFWGEVEKLDVPFYLHPRNPLPQDSRIYDGHPWLLGPTWAFAQETAVHALRLMASGLFDEHPRLNIILGHLGEGLPYMMYRIDHRIAWVHEPPRYPAKRRFMDYFNENFHITTSGNFRTQTLIDAILEIGADRILFSTDWPFENIDHAADWFNATSIAEADRLKIGRTNARRLFKLDGA

SEQ ID NO: 267 - protein, 328 aa, Artificial Sequence
  synthetic construct; Dicamba decarboxylase variant
MAQGKVALEEHFAIPETLQDSAGFVPGDYWKELQHRLLDIQDTRLKLMDAHGIETMILSLAAPAVQAIPDRVQAIEIARRANDFLAEECAKRPDRFLAFAALPLQDPDAATEELQRCVNDLGFVGALVNGFSQEGDGQTPLYYDLPQYRPFWGEVEKLDVPFYLHPRNPLPQDSRIYDGHPWLLGPTWAFAQETAVHALRLMASGLFDEHPRLNIILGHMGEGLPYMMYRIDHRIAWVHEPPRYPAKRRFMDYFNENFHITTSGNFRTQTLIDAILEIGADRILFSTDWPFENIDHAADWFNATSIAEADRVKIGRTNARRLFKLDGD

SEQ ID NO: 268 - protein, 328 aa, Artificial Sequence
  synthetic construct; Dicamba decarboxylase variant
MAQGKVALEEHFAIPETLQDSAGFVPGDYWKELQHRLLDIQDTRLKLMDAHGIETMILSLAAPAVQAIPDRRKAIEIARRANDFLAEECAKRPDRFLAFAALPLQDPDAASEELQRCVNTLGFVGALVNGFSVEGDGQTPLYYDLPQYRPFWGEVEKLDVPFYLHPRNPLPQDSRIYDGHPWLLGPTWAFAQETAVHALRLMASGLFDEHPRLNIILGHMGEGLPYMMYRIDHRIAWVHEPPRYPAKRRFMDYFNENFHITTSGNFRTQTLIDAILEIGADRILFATDWPFENIDHAADWFNATSIAEADRVKIGRTNARRLFKLDLD

SEQ ID NO: 269 - protein, 328 aa, Artificial Sequence
  synthetic construct; Dicamba decarboxylase variant
MAQGKVALEEHFAIPETLQDSAGFVPGDYWKELQHRLLDIQDTRLKLMDAHGIETMILSLAAPAVQAIPDRRKAIEIARRANDFLAEECAKRPDRFLAFAALPLQDPDAATEELQRCVNTLGFVGALVNGFSQEGDGQTPLYYDLPQYRPFWGEVEKLDVPFYLHPRNPLPQDSRIYDGHPWLLGPTWAFAQETAVHALRLMASGLFDEHPRLNIILGHMGEGLPYMMYRIDHRIAWVKLPPRYPAKRRFMDYFLENFHITTSGNFRTQTLIDAILEIGADRILFSTDWPFENIDHAADWFNATSIAEADRVKIGRTNARRLFKLDGA

SEQ ID NO: 270 - protein, 328 aa, Artificial Sequence
  synthetic construct; Dicamba decarboxylase variant
MAQGKVALEEHFAIPETLQDSAGFVPGDYWKELQHRLLDIQDTRLKLMDAHGIETMILSLAAPAVQAIPDRRKAIEIARRANDFLAEECAKRPDRFLAFAALPLQDPDAATEELQRCVNDLGFVGALVNGFSQEGDGQTPLYYDLPQYRPFWGEVEKLDVPFYLHPRNPLPQDSRIYDGHPWLLGPTWAFAQETAVHALRLMASGLFDEHPRLNIILGHLGEGLPYMMYRIDHRIAWVKLPPRYPAKRRFMDYFNENFHITTSGNFRTQTLIDAILEIGADRILFSTDWPFENIDHAADWFNATSIAEADRVKIGRTNARRLFKLDLD

SEQ ID NO: 271 - protein, 328 aa, Artificial Sequence
  synthetic construct; Dicamba decarboxylase variant
MAQGKVALEEHFAIPETLQDSAGFVPSDYLKELQHRLLDIQDTRLKLMDAHGIETMILSLAAVGVQAIPDRRKAIEIARRANDFLAEECAKRPDRFLAFAALPLQDPDAATEELQRCVNDLGFVGALVNGFSQEGDGQTPLYYDLPQYRPFWGEVEKLDVPFYLHPRNPLPQDSRIYDGHPWLLGPTWAFAQETAVHALRLMASGLFDEHPRLNIILGHLGEGLPYMMYRIDHRIAWVHEPPRYPAKRRFMDYFNENFHITTSGNFRTQTLIDAILEIGADRILFSTDWPFENIDHAADWFNATSIAEADRVKIGRTNARRLFKLDGD

SEQ ID NO: 272 - protein, 328 aa, Artificial Sequence
  synthetic construct; Dicamba decarboxylase variant
MAQGKVALEEHFAIPETLNDSAGFVPGDYWKELQHRLLDIQDTRLKLMDAHGIETMILSLAAPAVQAIPDRRKAIEIARRANDFLAEECAKRPDRFLAFAALPLQDPDAATEELQRCVNTLGFVGALVNGFSQEGDGQTPLYYDLPQYRPFWGEVEKLDVPFYLHPRNPLPQDSRIYDGHPWLLGPTWAFAQETAVHALRLMASGLFDEHPRLNIILGHLGEGLPYMMYRIDHRIAWVKLPPRYPAKRRFMDYFNENFHITTSGNFRTQTLIDAILEIGADRILFSTDWPFENIDHAADWFNATSIAEADRVKIGRTNARRLFKLDGA

SEQ ID NO: 273 - protein, 328 aa, Artificial Sequence
  synthetic construct; Dicamba decarboxylase variant
MAQGKVALEEHFAIPETLQDTAGFVPGDYWKELQHRLLDIQDTRLKLMDAHGIETMILSLAAPAVQAIPDRRKAIEIARRANDFLAEECAKRPDRFLAFAALPLQDPDAATEELQRTVNDLGFVGALVNGFSQEGDGQTPLYYDLPQYRPFWGEVEKLDVPFYLHPRNPLPQDSRIYDGHPWLLGPTWAFAQETAVHALRLMASGLFDEHPRLNIILGHMGEGLPYMMYRIDHRIAWVKLPPRYPAKRRFMDYFNENFHITTSGNFRTQTLIDAILEIGADRILFSTDWPFENIDHAADWFNATSIAEADRLKIGRTNARRLFKLDGD

SEQ ID NO: 274 - protein, 328 aa, Artificial Sequence
  synthetic construct; Dicamba decarboxylase variant
MAQGKVALEEHFAIPETLQDSAGFVPGDYWKELQHRLLDIQDTRLKLMDAHGIETMILSLAAPAVQAIPDRRKAIEIARRANDFLAEECAKRPDRFLAFAALPMQDVDAATEELQRCVNDLGFVGALVNGFSVEGDGQTPLYYDLPQYRPFWGEVEKLDVPFYLHPRNPLPQDSRIYDGHPWLLGPTWAFAQETAVHALRLMASGLFDEHPRLNIILGHLGEGLPYMMYRIDHRIAWVKLPPRYPAKRRFMDYFNENFHITTSGNFRTQTLIDAILEIGADRILFSTDWPFENIDHAADWFNATSIAEADRVKIGRTNARRLFKLDLD

SEQ ID NO: 275 - protein, 328 aa, Artificial Sequence
  synthetic construct; Dicamba decarboxylase variant
MAQGKVALEEHFAIPETLQDSAGFVPGDYWKELQHRLLDIQDTRLKLMDAHGIETMVLSLAAPAVQAIPDRRKAIEIARRANDMLAEECAKRPDRFLAFAALPLQDPDAATEELQRCVNDLGFVGALVNGFSQEGDGQTPLYYDLPQYRPFWGEVEKLDVPFYLHPRNPLPQDSRIYDGHPWLLGPTWAFAQETAVHALRLMASGLFDEHPRLNIILGHMGEGLPYMMYRIDHRIAWVHEPPRYPAKRRFMDYFNENFHITTSGNFRTQTLIDAILEIGADRILFSTDWPFENIDHAAAWFNATSIAEADRVKIGRTNARRLFKLDGA

SEQ ID NO: 276 - protein, 328 aa, Artificial Sequence
  synthetic construct; Dicamba decarboxylase variant
MAQGKVALEEHFAIPETLQDSAGFVPGDYWKELQHRLLDIQDTRLKLMDAHGIETMILSLAAPAVQAIPDRRKAIEIARRANDLLAEECAKRPDRFLAFAALPMQDPDAATEELQRCVNDLGFVGALVNGFSQEGDGQTPLYYDLPQYRPFWGEVEKLDVPFYLHPRNPLPQDSRIYDGHPWLLGPTWAFAQETAVHALRLMASGLFDEHPRLNIILGHMGEGLPYMMYRIDHRIAWVKLPPRYPAKRRFMDYFNENFHITTSGNFRTQTLIDAILEIGADRILFSTDWPFENIDHAADWFNATSIAEADRVKIGRTNARRLFKLDGA

SEQ ID NO: 277 - protein, 328 aa, Artificial Sequence
  synthetic construct; Dicamba decarboxylase variant
MAQGKVALEEHFAIPETLQDSAGFVPGDYWKELQHRLLDIQDTRLKLMDKHGIETMILSLAAPAVQAIPDRRKAIEIARRANDMLAEECAKRPDRFLAFAALPLQDPDAATEELQRCVNDLGFVGALVNGFSQEGDGQTPLYYDLPQYRPFWGEVEKLDVPFYLHPRNPLPQDSRIYDGHPWLLGPTWAFAQETAVHALRLMASGLFDERPRLNIILGHMGEGLPYMMYRIDHRIAWVHEPPRYPAKRRFMDYFNENFHITTSGNFRTQTLIDAILEIGADRILFSTDWPFENIDHATAWFNATSIAEADRVKIGRTNARRLFKLDGA

SEQ ID NO: 278 - protein, 328 aa, Artificial Sequence
  synthetic construct; Dicamba decarboxylase variant
MAQGKVALEEHFAIPETLQDSAGFVPGDYWKELQHRLLDIQDTRLKLMDAHGIETMILSLAAPAVQAIPDRRKAIEIARRANDFLAEECAKRPDRFLAFAALPLQDPDAATEELQRCVNDLGFVGALVNGFSQEGDGQTPLYYDLPQYRPFWGEVEKLDVPFYLHPRNPLPQDSRIYDGHPWLLGPTWAFAQETAVHALRLMASGLFDEHPRLNIILGHMGEGLPYMMYRIDHRIAWVHEPPRYPAKRRFMDYFNENFHITTSGNFRTQTLIDAILEIGADRILFSTDWPFENIDHAAAWFNATSIAEADRLKIGRTNARRLFKLDGA

SEQ ID NO: 279 - protein, 328 aa, Artificial Sequence
  synthetic construct; Dicamba decarboxylase variant
MAQGKVALEEHFAIPETLQDSAGFVPGDYWKELQHRLLDIQDTRLRLMDAHGIETMILSLAAPAVQAIPDRRKAIEIARRANDMLAEECAKRPDRFLAFAALPLQDPDAATEELQRCVNDLGFVGALVNGFSQEGDGQTPLYYDLPQYRPFWGEVEKLDVPFYLHPRNPLPQDSRIYDGHPWLLGPTWAFAQETAVHALRLMASGLFDEHPRLNIILGHLGEGLPYMMYRIDHRIAWVHEPPRYPAKRRFMDYFNENFHITTSGNFRTQTLIDAILEIGADRILFSTDWPFENIDHAADWFNATSIAEADRLKIGRTNARRLFKLDGD

SEQ ID NO: 280 - protein, 328 aa, Artificial Sequence
  synthetic construct; Dicamba decarboxylase variant
MAQGKVALEEHFAIPETLQDSAGFVPGDYWKELQHRLLDIQDTRLRLMDAHGIETMILSLAAPAVQAIPDRRKAIEIARRANDFLAEECAKRPDRFLAFAALPLQDPDAATEELQRCVNDLGFVGALVNGFSQEGDGQTPLYYDLPQYRPFWGEVEKLDVPFYLHPRNPLPQDSRIYDGHPWLLGPTWAFAQETAVHALRLMASGLFDEHPRLNIILGHMGEGLPYMMYRIDHRIAWVKLPPRYPAKRRFMDYFNENFHITTSGNFRTQTLIDAILEIGADRILFSTDWPFENIDHATDWFNATSIAEADRVKIGRTNARRLFKLDLD

SEQ ID NO: 281 - protein, 328 aa, Artificial Sequence
  synthetic construct; Dicamba decarboxylase variant
MAQGKVALEEHFAIPETLNDSAGFVPGDYWKELQHRLLDIQDTRLKLMDAHGIETMILSLAAPAVQAIPDRRKAIEIARRANDFLAEECAKRPDRFLAFAALPLQDPDAASEELQRCVNDLGFVGALVNGFSVEGDGQTPLYYDLPQYRPFWGEVEKLDVPFYLHPRNPLPQDSRIYDGHPWLLGPTWAFAQETAVHALRLMASGLFDEHPRLNIILGHMGEGLPYMMYRIDHRIAWVKLPPRYPAKRRFMDYFNENFHITTSGNFRTQTLIDAILEIGADRILFSTDWPFENIDHAADWFNATSIAEADRLKIGRTNARRLFKLDGD

SEQ ID NO: 282 - protein, 328 aa, Artificial Sequence
  synthetic construct; Dicamba decarboxylase variant
MAQGKVALEEHFAIPETLQDSAGFVPGDYWKELQHRLLDIQDTRLKLMDAHGIETMILSLAAPAVQAIPDRRQAIEIARRANDFLAEECAKRPDRFLAFAALPLQDPDAATEELQRCVNDLGFVGALVNGFSQEGDGQTPLYYDLPQYRPFWGEVEKLDVPFYLHPRNPLPQDSRIYDGHPWLLGPTWAFAQETAVHALRLMASGLFDEHPRLNIILGHLGEGLPYMMYRIDHRIAWVKLPPRYPAKRRFMDYFNENFHITTSGNFRTQTLIDAILEIGADRILFSTDWPFENIDHAADWFNATSIAEADRVKIGRTNARRLFKLDGD

SEQ ID NO: 283 - protein, 328 aa, Artificial Sequence
  synthetic construct; Dicamba decarboxylase variant
MAQGKVALEEHFAIPETLQDSAGFVPGDYWKELQHRLLDIQDTRLKLMDAHGIETMILSLAAPAVQAIPDRRQAIEIARRANDFLAEECAKRPDRFLAFAALPLQDPDAASEELQRCVNDLGFVGALVNGFSVEGDGQTPLYYDLPQYRPFWGEVEKLDVPFYLHPRNPLPQDSRIYDGHPWLLGPTWAFAQETAVHALRLMASGLFDEHPRLNIILGHMGEGLPYMMYRIDHRIAWVHEPPRYPAKRRFMDYFNENFHITTSGNFRTQTLIDAILEIGADRILFSTDWPFENIDHATDWFNATSIAEADRVKIGRTNARRLFKLDGA

SEQ ID NO: 284 - protein, 328 aa, Artificial Sequence
  synthetic construct; Dicamba decarboxylase variant
MAQGKVALEEHFAIPETLQDSAGFVPGDYWKELQHRLLDIQDTRLKLMDAHGIETMILSLAAPAVQAIPDRRKAIEIARRANDFLAEECAKRPDRFLAFAALPLQDPDAASEELQRCVNDLGFVGALVNGFSVEGDGQTPLYYDLPQYRPFWGEVEKLDVPFYLHPRNPLPQDSRIYDGHPWLLGPTWAFAQETAVHALRLMASGLFDEHPRLNIILGHMGEGLPYMMYRIDHRIAWVKLPPRYPAKRRFMDYFNENFHITTSGNFRTQTLIDAILEIGADRILFSTDWPFENIDHAADWFNATSIAEADRVKIGRTNARRLFKLDGA

SEQ ID NO: 285 - protein, 328 aa, Artificial Sequence
  synthetic construct; Dicamba decarboxylase variant
MAQGKVALEEHFAIPETLQDSAGFVPGDYWKELQHRLLDIQDTRLRLMDAHQIETMILSLAAPGVQAIPDRRKAIEIARRANDFLAEECAKRPDRFLAFAALPLQDPDAATEELQRCVNDLGFVGALVNGFSQEGDGQTPLYYDLPQYRPFWGEVEKLDVPFYLHPRNPLPQDSRIYDGHPWLLGPTWAFAQETAVHALRLMASGLFDEHPRLNIILGHMGEGLPYMMYRIDHRIAWVHEPPRYPAKRRFMDYFNENFHITTSGNFRTQTLIDAILEIGADRILFSTDWPFENIDHAADWFNATSIAEADRLKIGRTNARRLFKLDGA

SEQ ID NO: 286 - protein, 328 aa, Artificial Sequence
  synthetic construct; Dicamba decarboxylase variant
MAQGKVALEEHFAIPETLQDSAGFVPGDYWKELQHRLLDIQDTRLKLMDAHGIETMILSLAAPAVQAIPDRRKAIEIARRANDMLAEECAKRPDRFLAFAALPLQDPDAATEELQRCVNDLGFVGALVNGFSVEGDGQTPLYYDLPQYRPFWGEVEKLDVPFYLHPRNPLPQDSRIYDGHPWLLGPTWAFAQETAVHALRLMASGLFDEHPRLNIILGHLGEGLPYMMYRIDHRIAWVHEPPRYPAKRRFMDYFNENFHITTSGNFRTQTLIDAILEIGADRILFSTDWPFENIDHAADWFNATSIAEADRLKIGRTNARRLFKLDGA

SEQ ID NO: 287 - protein, 328 aa, Artificial Sequence
  synthetic construct; Dicamba decarboxylase variant
MAQGKVALEEHFAIPETLQDSAGFVPGDYWKELQHRLLDIQDTRLKLMDAHGIETMILSLAAPAVQAIPDRRKAIEIARRANDFLAEECAKRPDRFLAFAALPLQDPDAATEELQRTVNNLGFVGALVNGFSQEGDGQTPLYYDLPQYRPFWGEVEKLDVPFYLHPRNPLPQDSRIYDGHPWLLGPTWAFAQETAVHALRLMASGLFDEHPRLNIILGHMGEGLPYMMYRIDHRIAWVQEPPRYPAKRRFMDYFNENFHITTSGNFRTQTLIDAILEIGADRILFSTDWPFENIDHAADWFNATSIAEADRVKIGRTNARRLFKLDGD

SEQ ID NO: 288 - protein, 328 aa, Artificial Sequence
  synthetic construct; Dicamba decarboxylase variant
MAQGKVALEEHFAIPETLQDSAGFVPGDYWKELQHRLLDIQDTRLKLMDAHGIETMILSLAAPAVQAIPDRRKAIEIARRANDFLAEECAKRPDRFLAFAALPLQDPDAATEELQRCVNTLGFVGALVNGFSQEGDGQTPLYYDLPQYRPFWGEVEKLDVPFYLHPRNPLPQDSRIYDGHPWLLGPTWAFAQETAVHALRLMASGLFDEHPRLNIILGHMGEGLPYMMYRIDHRIAWVKLPPRYPAKRRFMDYFNENFHITTSGNFRTQTLIDAILEIGADRILFSTDWPFENIDHAADWFNATSIAEADRLKIGRTNARRLFKLDLD

SEQ ID NO: 289 - protein, 328 aa, Artificial Sequence
  synthetic construct; Dicamba decarboxylase variant
MAQGKVALEEHFAIPETLQDSAGFVPGDYWKELQHRLLDIQDTRLKLMDAHGIGTMILSLAAPAVQAIPDRRKAIEIARRANDFLAEECAKRPDRFLAFAALPLQDPDAATEELQRCVNDLGFVGALVNGFSQEGDGQTPLYYDLPQYRPFWGEVEKLDVPFYLHPRNPLPQDSRIYDGHPWLLGPTWAFAQETAVHALRLMASGLFDEHPRLNIILGHMGEGLPYMMYRIDHRIAWVKLPPRYPAKRRFMDYFNENFHITTSGNFRTQTLIDAILEIGADRILFSTDWPFENIDHAADWFNATSIAEADRVKIGRTNARRLFKLDGD

SEQ ID NO: 290 - protein, 328 aa, Artificial Sequence
  synthetic construct; Dicamba decarboxylase variant
MAQGKVALEEHFAIPETLQDSAGFVPGDYWKELQHRLLDIQDTRLKLMDKHGIETMILSLAAPAVQAIPDRRKAIEIARRANDFLAEECAKRPDRFLAFAALPLQDPDAATEELQRCVNDLGFVGALVNGFSQEGDGQTPLYYDLPQYRPFWGEVEKLDVPFYLHPRNPLPQDSRIYDGHPWLLGPTWAFAQETAVHALRLMASGLFDEHPRLNIILGHMGEGLPYMMYRIDHRIAWVHEPPRYPAKRRFMDYFNENFHITTSGNFRTQTLIDAILEIGADRILFSTDWPFENIDHATDWFNATSIAEADRVKIGRTNARRLFKLDLD

SEQ ID NO: 291 - protein, 328 aa, Artificial Sequence
  synthetic construct; Dicamba decarboxylase variant
MAQGKVALEEHFAIPETLQDSAGFVPGDYWKELQHRLLDIQDTRLKLMDAHGIETMILSLAAPAVQAIPDRRKAIEIARRANDFLAEECAKRPDRFLAFAALPLQDPDAATEELQRCVNDLGFVGALVNGFSQEGDGQTPLYYDLPQYRPFWGEVEKLDVPFYLHPRNPLPQDSRIYDGHPWLLGPTWAFAQETAVHALRLMASGLFDEHPRLNIILGHMGEGLPYMMYRIDHRIAWVKLPPRYPAKRRFMDYFNENFHITTSGNFRTQTLIDAILEIGADRILFSTDWPFENIDHATDWFNATSIAEADRVKIGRTNARRLFKLDLD

SEQ ID NO: 292 - protein, 328 aa, Artificial Sequence
  synthetic construct; Dicamba decarboxylase variant
MAQGKVALEEHFAIPETLQDSAGFVPGDYWKELQHRLLDIQDTRLKLMDAHGIETMILSLAAPAVQAIPDRRKAIEIARRANDFLAEECAKRPDRFLAFAALPLQDPDAATEELQRTVNDLGFVGALVNGFSQEGDGQTPLYYDLPQYRPFWGEVEKLDVPFYLHPRNPLPQDSRIYDGHPWLLGPTWAFAQETAVHALRLMASGLFDEHPRLNIILGHLGEGLPYMMYRIDHRIAWVHEPPRYPAKRRFMDYFNENFHITTSGNFRTQTLIDAILEIGADRILFSTDWPFENIDHAADWFNATSIAEADRLKIGRTNARRLFKLDGA

SEQ ID NO: 293 - protein, 328 aa, Artificial Sequence
  synthetic construct; Dicamba decarboxylase variant
MAQGKVALEEHFAIPETLQDSAGFVPGDYWKELQHRLLDIQDTRLKLMDAHGIETMILSLAAPAVQAIPDRRKAIEIARRANDFLAEECAKRPDRFLAFAALPLQDPDAATEELQRTVNDLGFVGALVNGFSVEGDGQTPLYYDLPQYRPFWGEVEKLDVPFYLHPRNPLPQDSRIYDGHPWLLGPTWAFAQETAVHALRLMASGLFDEHPRLNIILGHMGEGLPYMMYRIDHRIAWVQEPPRYPAKRRFMDYFNENFHITTSGNFRTQTLIDAILEIGADRILFSTDWPFENIDHAADWFNATSIAEADRVKIGRTNARRLFKLDGD

SEQ ID NO: 294 - protein, 328 aa, Artificial Sequence
  synthetic construct; Dicamba decarboxylase variant
MAQGKVALEEHFAIPETLQDSAGFVPGDYWKELQHRLLDIQDTRLKLMDAHGIETMILSLAAPAVQAIPDRRKAIEIARRANDFLAEECAKRPDRFLAFAALPLQDPDAATEELQRCVNDLGFVGALVNGFSVEGDGQTPLYYDLPQYRPFWGEVEKLDVPFYLHPRNPLPQDSRIYDGHPWLLGPTWAFAQETAVHALRLMASGLFDEHPRLNIILGHLGEGLPYMMYRIDHRIAWVHEPPRYPAKRRFMDYFNENFHITTSGNFRTQTLIDAILEIGADRILFSTDWPFENIDHAADWFNATSIAEADRVKIGRTNARRLFKLDGA

SEQ ID NO: 295 - protein, 328 aa, Artificial Sequence
  synthetic construct; Dicamba decarboxylase variant
MAQGKVALEEHFAIPETLQDSAGYVPGDYWKELQHRLLDIQDTRLKLMDAHGIETMILSLAAPAVQAIPDRRKAIEIARRANDFLAEECAKRPDRFLAFAALPLQDPDAASEELQRCVNDLGFVGALVNGFSQEGDGQTPLYYDLPQYRPFWGEVEKLDVPFYLHPRNPLPQDSRIYDGHPWLLGPTWAFAQETAVHALRLMASGLFDEHPRLNIILGHMGEGLPYMMYRIDHRIAWVKLPPRYPAKRRFMDYFNENFHITTSGNFRTQTLIDAILEIGADRILFSTDWPFENIDHAADWFNATSIAEADRVKIGRTNARRLFKLDGA

SEQ ID NO: 296 - protein, 328 aa, Artificial Sequence
  synthetic construct; Dicamba decarboxylase variant
MAQGKVALEEHFAIPETLQDSAGFVPGDYWKELQHRLLDIQDTRLKLMDAHGIETMILSLAAPAVQAIPGRRKAIEIARRANDFLAEECAKRPDRFLAFAALPLQDPDAATEELQRCVNDLGFVGALVNGFSVEGDGQTPLYYDLPQYRPFWGEVEKLDVPFYLHPRNPLPQDSRIYDGHPWLLGPTWAFAQETAVHALRLMASGLFDEHPRLNIILGHLGEGLPYMMYRIDHRIAWVHEPPRYPAKRRFMDYFNENFHITTSGNFRTQTLIDAILEIGADRILFSTDWPFENIDHAADWFNATSIAEADRVKIGRTNARRLFKLDLD

SEQ ID NO: 297 - protein, 328 aa, Artificial Sequence
  synthetic construct; Dicamba decarboxylase variant
MAQGKVALEEHFAIPETLQDSAGFVPGDYWKELQHRLLDIQDTRLKLMDAHGIETMILSLAAPAVQAIPDRRKAIEIARRANDFLAEECAKRPDRFLAFAALPLQDPDAASEELQRCVNDLGFVGALVNGFSQEGDGQTPLYYDLPQYRPFWGEVEKLDVPFYLHPRNPLPQDSRIYDGHPWLLGPTWAFAQETAVHALRLMASGLFDEHPRLNIILGHMGEGLPYMMYRIDHRIAWVHEPPRYPAKRRFMDYFNENFHITTSGNFRTQTLIDAILEIGADRILFSTDWPFENIDHAADWFNATSIAEADRLKIGRTNARRLFKLDGA

SEQ ID NO: 298 - protein, 328 aa, Artificial Sequence
  synthetic construct; Dicamba decarboxylase variant
MAQGKVALEEHFAIPETLQDSAGFVPGDYWKELQHRLLDIQDTRLRLMDAHGIETMILSLAAPAVQAIPDRRKAIEIARRANDFLAEECAKRPDRFLAFAALPLQDPDAATEELQRCVNDLGFVGALVNGFSQEGDGQTPLYYDLPQYRPFWGEVEKLDVPFYLHPRNPLPQDSRIYDGHPWLLGPTWAFAQETAVHALRLMASGLFDEHPRLNIILGHMGEGLPYMMYRIDHRIAWVHEPPRYPAKRRFMDYFNENFHITTSGNFRTQTLIDAILEIGADRILFSTDWPFENIDHAADWFNATSIAEADRVKIGRTNARRLFKLDGD

SEQ ID NO: 299 - protein, 328 aa, Artificial Sequence
  synthetic construct; Dicamba decarboxylase variant
MAQGKVALEEHFAIPETLQDSAGFVPSDYLKELQHRLLDIQDTRLKLMDAHGIETMILSLAAPAVQAIPDRRKAIEIARRANDFLAEECAKRPDRFLAFAALPLQDPDAATEELQRCVNDLGFVGALVNGFSQEGDGQTPLYYDLPQYRPFWGEVEKLDVPFYLHPRNPLPQDSRIYDGHPWLLGPTWAFAQETAVHALRLMASGLFDEHPRLNIILGHLGEGLPYMMYRIDHRIAWVHEPPRYPAKRRFMDYFNENFHITTSGNFRTQTLIDAILEIGADRILFSTDWPFENIDHAADWFNATSIAEADRVKIGRTNARRLFKLDLD

SEQ ID NO: 300 - protein, 328 aa, Artificial Sequence
  synthetic construct; Dicamba decarboxylase variant
MAQGKVALEEHFAIPETLQDSAGFVPSDYLKELQHRLLDIQDTRLKLMDAHGIETMILSLAAPAVQAIPDRRKAIEIARRANDFLAEECAKRPDRFLAFAALPLQDPDAATEELQRTVNDLGFVGALVNGFSVEGDGQTPLYYDLPQYRPFWGEVEKLDVPFYLHPRNPLPQDSRIYDGHPWLLGPTWAFAQETAVHALRLMASGLFDEHPRLNIILGHMGEGLPYMMYRIDHRIAWVHEPPRYPAKRRFMDYFNENFHITTSGNFRTQTLIDAILEIGADRILFSTDWPFENIDHAADWFNATSIAEADRVKIGRTNARRLFKLDGD

SEQ ID NO: 301 - protein, 328 aa, Artificial Sequence
  synthetic construct; Dicamba decarboxylase variant
MAQGKVALEEHFAIPETLQDSAGFVPGDYWKELQHRLLDIQDTRLKLMDAHGIETMILSLAAPAVQAIPDRVKAIEIARRANDFLAEECAKRPDRFLAFAALPLQDPDAATEELQRCVNDLGFVGALVNGFSVEGDGQTPLYYDLPQYRPFWGEVEKLDVPFYLHPRNPLPQDSRIYDGHPWLLGPTWAFAQETAVHALRLMASGLFDEHPRLNIILGHLGEGLPYMMYRIDHRIAWVHEPPRYPAKRRFMDYFNENFHITTSGNFRTQTLIDAILEIGADRILFSTDWPFENIDHAADWFNATSIAEADRLKIGRTNARRLFKLDGD

SEQ ID NO: 302 - protein, 328 aa, Artificial Sequence
  synthetic construct; Dicamba decarboxylase variant
MAQGKVALEEHFAIPETLQDSAGFVPGDYWKELQHRLLDIQDTRLKLMDAHGIETMILSLAAPAVQAIPDRRKAIEIARRANDFLAEECAKRPDRFLAFAALPLQDPDAATEELQRCVNTLGFVGALVNGFSVEGDGQTPLYYDLPQYRPFWGEVEKLDVPFYLHPRNPLPQDSRIYDGHPWLLGPTWAFAQETAVHALRLMASGLFDEHPRLNIILGHMGEGLPYMMYRIDHRIAWVHEPPRYPAKRRFVDYFNENFHITTSGNFRTQTLIDAILEIGADRILFSTDWPFENIDHAADWFNATSIAEADRVKIGRTNARRLFKLDGA

SEQ ID NO: 303 - protein, 328 aa, Artificial Sequence
  synthetic construct; Dicamba decarboxylase variant
MAQGKVALEEHFAIPETLNDSAGFVPGDYWKELQHRLLDIQDTRLKLMDAHGIETMILSLAAPAVQAIPDRRKAIEIARRANDFLAEECAKRPDRFLAFAALPLQDPDAATEELQRCVNDLGFVGALVNGFSQEGDGQTPLYYDLPQYRPFWGEVEKLDVPFYLHPRNPLPQDSRIYDGHPWLLGPTWAFAQETAVHALRLMASGLFDEHPRLNIILGHLGEGLPYMMYRIDHRIAWVHEPPRYPAKRRFMDYFNENFHITTSGNFRTQTLIDAILEIGADRILFSTDWPFENIDHAADWFNATSIAEADRVKIGRTNARRLFKLDLD

SEQ ID NO: 304 - protein, 328 aa, Artificial Sequence
  synthetic construct; Dicamba decarboxylase variant
MAQGKVALEEHFAIPETLQDSAGFVPGDYWKELQHRLLDIQDTRLKLMDAHGIETMILSLAAPAVQAIPDRRKAIEIARRANDFLAEECAKRPDRFLAFAALPLQDPDAATEELQRCVNDLGFVGALVNGFSVEGDGQTPLYYDLPQYRPFWGEVEKLDVPFYLHPRNPLPQDSRIYDGHPWLLGPTWAFAQETAVHALRLMASGLFDEHPRLNIILGHLGEGLPYMMYRIDHRIAWVHEPPRYPAKRRFMDYFNENFHITTSGNFRTQTLIDAILEIGADRILFSTDWPFENIDHAADWFNATSIAEADRVKIGRTNARRLFKLDGD

SEQ ID NO: 305 - protein, 328 aa, Artificial Sequence
  synthetic construct; Dicamba decarboxylase variant
MAQGKVALEEHFAIPETLQDSAGFVPGDYWKELQHRLLDIQDTRLRLMDAHGIETMILSLAAPAVQAIPDRRKAIEIARRANDFLAEECAKRPDRFLAFAALPLQDPDAATEELQRCVNDLGFVGALVNGFSQEGDGQTPLYYDLPQYRPFWGEVEKLDVPFYLHPRNPLPQDSRIYDGHPWLLGPTWAFAQETAVHALRLMASGLFDEHPRLNIILGHMGEGLPYMMYRIDHRIAWVKLPPRYPAKRRFMDYFNENFHITTSGNFRTQTLIDAILEIGADRILFSTDWPFENIDHAADWFNATSIAEADRVKIGRTNARRLFKLDGA

SEQ ID NO: 306 - protein, 328 aa, Artificial Sequence
  synthetic construct; Dicamba decarboxylase variant
MAQGKVALEEHFAIPETLQDSAGFVPSEYLKELQHRLLDIQDTRLKLMDAHGIETMILSLAAPAVQAIPDRVKAIEIARRANDMLAEECAKRPDRFLAFAALPLQDPDAATEELQRCVNDLGFVGALVNGFSQEGDGQTPLYYDLPQYRPFWGEVEKLDVPFYLHPRNPLPQDSRIYDGHPWLLGPTWAFAQETAVHALRLMASGLFDEHPRLNIILGHMGEGLPYMMYRIDHRIAWVHEPPRYPAKRRFMDYFNENFHITTSGNFRTQTLIDAILEIGADRILFSTDWPFENIDHAADWFNATSIAEADRVKIGRTNARRLFKLDGA

SEQ ID NO: 307 - protein, 328 aa, Artificial Sequence
  synthetic construct; Dicamba decarboxylase variant
MAQGKVALEEHFAIPETLQDSAGFVPGDYWKELQHRLLDIQDTRLKLMDAHGIETMILSLAAPAVQAIPDRRKAIEIARRANDFLAEECAKRPDRFLAFAALPLQDVDAASEELQRCVNDLGFVGALVNGFSQEGDGQTPLYYDLPQYRPFWGEVEKLDVPFYLHPRNPLPQDSRIYDGHPWLLGPTWAFAQETAVHALRLMASGLFDEHPRLNIILGHMGEGLPYMMYRIDHRIAWVHEPPRYPAKRRFMDYFNENFHITTSGNFRTQTLIDAILEIGADRILFSTDWPFENIDHATDWFNATSIAEADRVKIGRTNARRLFKLDLD

SEQ ID NO: 308 - protein, 328 aa, Artificial Sequence
  synthetic construct; Dicamba decarboxylase variant
MAQGKVALEEHFAIPETLQDSAGFVPGDYWKELQHRLLDIQDTRLKLMDAHGIETMILSLAAPAVQAILDRRKAIEIARRANDMLAEECAKRPDRFLAFAALPLQDPDAATEELQRCVNDLGFVGALVNGFSQEGDGQTPLYYDLPQYRPFWGEVEKLDVPFYLHPRNPLPQDSRIYDGHPWLLGPTWAFAQETAVHALRLMASGLFDEHPRLNIILGHLGEGLPYMMYRIDHRIAWVHEPPRYPAKRRFMDYFNENFHITTSGNFRTQTLIDAILEIGADRILFSTDWPFENIDHATDWFNATSIAEADRLKIGRTNARRLFKLDLD

SEQ ID NO: 309 - protein, 328 aa, Artificial Sequence
  synthetic construct; Dicamba decarboxylase variant
MAQGKVALEEHFAIPETLQDSAGFVPGDYWKELQHRLLDIQDTRLRLMDAHGIGTMILSLAAPAVQAIPDRRKAIEIARRANDFLAEECAKRPDRFLAFAALPMQDPDAATEELQRTVNDLGFVGALVNGFSQEGDGQTPLYYDLPQYRPFWGEVEKLDVPFYLHPRNPLPQDSRIYDGHPWLLGPTWAFAQETAVHALRLMASGLFDEHPRLNIILGHMGEGLPYMMYRIDHRIAWVHEPPRYPAKRRFMDYFNENFHITTSGNFRTQTLIDAILEIGADRILFSTDWPFENIDHAADWFNATSIAEADRVKIGRTNARRLFKLDGD

SEQ ID NO: 310 - protein, 328 aa, Artificial Sequence
  synthetic construct; Dicamba decarboxylase variant
MAQGKVALEEHFAIPETLQDSAGFVPGDYWKELQHRLLDIQDTRLRLMDAHGIETMILSLAAPAVQAIPDRRKAIEIARRANDFLAEECAKRPDRFLAFAALPLQDPDAATEELQRCVNTLGFVGALVNGFSVEGDGQTPLYYDLPQYRPFWGEVEKLDVPFYLHPRNPLPQDSRIYDGHPWLLGPTWAFAQETAVHALRLMASGLFDEHPRLNIILGHMGEGLPYMMYRIDHRIAWVHEPPRYPAKRRFMDYFNENFHITTSGNFRTQTLIDAILEIGADRILFSTDWPFENIDHAADWFNATSIAEADRLKIGRTNARRLFKLDGD

SEQ ID NO: 311 - protein, 328 aa, Artificial Sequence
  synthetic construct; Dicamba decarboxylase variant
MAQGKVALEEHFAIPETLQDSAGFVPGDYWKELQHRLLDIQDTRLKLMDAHGIETMILSLAAPAVQAIPDRRKAIEIARRANDFLAEECAKRPDRFLAFAALPLQDPDAATEELQRCVNDLGFVGALVNGFSQEGDGQTPLYYDLPQYRPFWGEVEKLDVPFYLHPRNPLPQDSRIYDGHPWLLGPTWAFAQETAVHALRLMASGLFDEHPRLNIILGHMGEGLPYMMYRIDHRIAWVHEPPRYPARRRFMDYFNENFHITTSGNFRTQTLIDAILEIGADRILFSTDWPFENIDHATDWFNATSIAEADRLKIGRTNARRLFKLDGD

SEQ ID NO: 312 - protein, 328 aa, Artificial Sequence
  synthetic construct; Dicamba decarboxylase variant
MAQGKVALEEHFAIPETLQDSAGFVPGDYWKELQHRLLDIQDTRLRLMDAHGIETMILSLAAPAVQAIPDRRKAIEIARRANDFLAEECAKRPDRFLAFAALPLQDPDAATEELQRCVNDLGFVGALVNGFSVEGDGQTPLYYDLPQYRPFWGEVEKLDVPFYLHPRNPLPQDSRIYDGHPWLLGPTWAFAQETAVHALRLMASGLFDEHPRLNIILGHMGEGLPYMMYRIDHRIAWVHEPPRYPAKRRFMDYFNENFHITTSGNFRTQTLIDAILEIGADRILFSTDWPFENIDHAADWFNATSIAEADRVKIGRTNARRLFKLDGA

SEQ ID NO: 313 - protein, 328 aa, Artificial Sequence
  synthetic construct; Dicamba decarboxylase variant
MAQGKVALEEHFAIPETLQDSAGFVPGDYWKELQHRLLDIQDTRLKLMDAHGIETMILSLAAPGVQAIPDRRKAIEIARRANDMLAEECAKRPDRFLAFAALPLQDPDAATEELQRCVNDLGFVGALVNGFSVEGDGQTPLYYDLPQYRPFWGEVEKLDVPFYLHPRNPLPQDSRIYDGHPWLLGPTWAFAQETAVHALRLMASGLFDEHPRLNIILGHMGEGLPYMMYRIDHRIAWVHEPPRYPAKRRFMDYFNENFHITTSGNFRTQTLIDAILEIGADRILFSTDWPFENIDHAADWFNATSIAEADRVKIGRTNARRLFKLDGD

SEQ ID NO: 314 - protein, 328 aa, Artificial Sequence
  synthetic construct; Dicamba decarboxylase variant
MAQGKVALEEHFAIPETLQDSAGFVPGDYWKELQHRLLDIQDTRLKLMDAHGIETMILSLAAPAVQAIPDRGQAIEIARRANDFLAEECAKRPDRFLAFAALPLQDPDAATEELQRTVNDLGFVGALVNGFSQEGDGQTPLYYDLPQYRPFWGEVEKLDVPFYLHPRNPLPQDSRIYDGHPWLLGPTWAFAQETAVHALRLMASGLFDEHPRLNIILGHLGEGLPYMMYRIDHRIAWVHEPPRYPAKRRFMDYFNENFHITTSGNFRTQTLIDAILEIGADRILFSTDWPFENIDHAADWFNATSIAEADRVKIGRTNARRLFKLDGA

SEQ ID NO: 315 - protein, 328 aa, Artificial Sequence
  synthetic construct; Dicamba decarboxylase variant
MAQGKVALEEHFAIPETLQDSAGFVPGDYWKELQHRLLDIQDTRLKLMDAHRIETMILSLAAPAVQAIPDRRKAIEIARRANDFLAEECAKRPDRFLAFAALPLQDPDAATEELQRCVNDLGFVGALVNGFSQEGDGQTPLYYDLPQYRPFWGEVEKLDVPFYLHPRNPLPQDSRIYDGHPWLLGPTWAFAQETAVHALRLMASGLFDEHPRLNIILGHMGEGLPYMMYRIDHRIAWVKLPPRYPAKRRFMDYFNENFHITTSGNFRTQTLIDAILEIGADRILFSTDWPFENIDHAADWFNATSIAEADRVKIGRTNARRLFKLDGD

SEQ ID NO: 316 - protein, 328 aa, Artificial Sequence
  synthetic construct; Dicamba decarboxylase variant
MAQGKVALEEHFAIPETLQDSAGFVPGDYWKELQHRLLDIQDTRLKLMDAHGIETMILSLAAPAVQAIPDRRKAIEIARRANDFLAEECAKRPDRFLAFAALPLQDPDAATEELQRCVNTLGFVGALVNGFSVEGDGQTPLYYDLPQYRPFWGEVEKLDVPFYLHPRNPLPQDSRIYDGHPWLLGPTWAFAQETAVHALRLMASGLFDEHPRLNIILGHLGEGLPYMMYRIDHRIAWVHEPPRYPAKRRFMDYFNENFHITTSGNFRTQTLIDAILEIGADRILFSTDWPFENIDHATDWFNATSIAEADRVKIGRTNARRLFKLDGD

SEQ ID NO: 317 - protein, 328 aa, Artificial Sequence
  synthetic construct; Dicamba decarboxylase variant
MAQGKVALEEHFAIPETLQDSAGFVPGDYWKELQHRLLDIQDTRLKLMDAHGIETMILSLAAPAVQAIPDRRKAIEIARRANDFLAEECAKRPDRFLAFAALPMQDPDAATEELQRCVNDLGFVGALVNGFSQEGDGQTPLYYDLPQYRPFWGEVEKLDVPFYLHPRNPLPQDSRIYDGHPWLLGPTWAFAQETAVHALRLMASGLFDEHPRLNIILGHMGEGLPYMMYRIDHRIAWVKLPPRYPAKRRFMDYFNENFHITTSGNFRTQTLIDAILEIGADRILFSTDWPFENIDHAADWFNATSIAEADRVKIGRTNARRLFKLDGD

SEQ ID NO: 318 - protein, 328 aa, Artificial Sequence
  synthetic construct; Dicamba decarboxylase variant
MAQGKVALEEHFAIPETLQDSAGFVPGDYWKELQHRLLDIQDTRLKLMDAHGIETMILSLAAPAVQAIPDRRKAIEIARRANDFLAEECAKRPDRFLAFAALPLQDPDAATEELQRCVNDLGFVGALVNGFSQEGDGQTPLYYDLPQYRPFWGEVEKLDVPFYLHPRNPLPQDSRIYDGHPWLLGPTWAFAQETAVHALRLMASGLFDEHPRLNIILGHLGEGLPYMMYRIDHRIAWVKLPPRYPAKRRFMDYFNENFHITTSGNFRTQTLIDAILEIGADRILFSTDWPFENIDHAADWFNATSIAEADRVKIGRTNARRLFKLDGA

SEQ ID NO: 319 - protein, 328 aa, Artificial Sequence
  synthetic construct; Dicamba decarboxylase variant
MAQGKVALEEHFAIPETLQDSAGFVPGDYWKELQHRLLDIQDTRLKLMDAHGIETMILSLAAPAVQAIPDRRKAIEIARRANDILAEECAKRPDRFLAFAALPMQDPDAATEELQRCVNDLGFVGALVNGFSQEGDGQTPLYYDLPQYRPFWGEVEKLDVPFYLHPRNPLPQDSRIYDGHPWLLGPTWAFAQETAVHALRLMASGLFDEHPRLNIILGHMGEGLPYMMYRIDHRIAWVKLPPRYPAKRRFMDYFNENFHITTSGNFRTQTLIDAILEIGADRILFSTDWPFENIDHAADWFNATSIAEADRVKIGRTNARRLFKLDVD

SEQ ID NO: 320 - protein, 328 aa, Artificial Sequence
  synthetic construct; Dicamba decarboxylase variant
MAQGKVALEEHFAIPETLQDSAGFVPSEYLKELQHRLLDIQDTRLKLMDAHGIETMILSLAAPAVQAIPDRRKAIEIARRANDFLAEECAKRPDRFLAFAALPLQDPDAATEELQRTVNDLGFVGALVNGFSQEGDGQTPLYYDLPQYRPFWGEVEKLDVPFYLHPRNPLPQDSRIYDGHPWLLGPTWAFAQETAVHALRLMASGLFDEHPRLNIILGHLGEGLPYMMYRIDHRIAWVHEPPRYPAKRRFMDYFNENFHITTSGNFRTQTLIDAILEIGADRILFSTDWPFENIDHATAWFNATSIAEADRVKIGRTNARRLFKLDGA

SEQ ID NO: 321 - protein, 328 aa, Artificial Sequence
  synthetic construct; Dicamba decarboxylase variant
MAQGKVALEEHFAIPETLQDSAGFVPGDYWKELQHRLLDIQDTRLKLMDAHQIETMILSLAAPAVQAIPDRRKAIEIARRANDFLAEECAKRPDRFLAFAALPLQDPDAATEELQRCVNDLGFVGALVNGFSVEGDGQTPLYYDLPQYRPFWGEVEKLDVPFYLHPRNPLPQDSRIYDGHPWLLGPTWAFAQETAVHALRLMASGLFDEHPRLNIILGHMGEGLPYMMYRIDHRIAWVHEPPRYPAKRRFMDYFNENFHITTSGNFRTQTLIDAILEIGADRILFSTDWPFENIDHAAAWFNATSIAEADRLKIGRTNARRLFKLDGD

SEQ ID NO: 322 - protein, 328 aa, Artificial Sequence
  synthetic construct; Dicamba decarboxylase variant
MAQGKVALEEHFAIPETLQDSAGFVPGDYWKELQHRLLDIQDTRLKLMDAHGIETMILSLAAPAVQAIPDRRKAIEIARRANDFLAEECAKRPDRFLAFAALPLQDPDAATEELQRCVNDLGFVGALVNGFSVEGDGQTPLYYDLPQYRPFWGEVEKLDVPFYLHPRNPLPQDSRIYDGHPWLLGPTWAFAQETAVHALRLMASGLFDEHPRLNIILGHMGEGLPYMMYRIDHRIAWVHEPPRYPAKRRFMDYFNENFHITTSGNFRTQTLIDAILEIGADRILFSTDWPFENIDHAADWFNATSIAEADRVKIGRTNARRLFKLDLD

SEQ ID NO: 323 - protein, 328 aa, Artificial Sequence
  synthetic construct; Dicamba decarboxylase variant
MAQGKVALEEHFAIPETLNDSAGFVPGDYWKELQHRLLDIQDTRLKLMDAHGIETMILSLAAPAVQAIPDRRKAIEIARRANDMLAEECAKRPDRFLAFAALPLQDPDAASEELQRCVNDLGFVGALVNGFSQEGDGQTPLYYDLPQYRPFWGEVEKLDVPFYLHPRNPLPQDSRIYDGHPWLLGPTWAFAQETAVHALRLMASGLFDEHPRLNIILGHMGEGLPYMMYRIDHRIAWVHEPPRYPAKRRFMDYFNENFHITTSGNFRTQTLIDAILEIGADRILFSTDWPFENIDHAADWFNATSIAEADRVKIGRTNARRLFKLDGD

SEQ ID NO: 324 - protein, 328 aa, Artificial Sequence
  synthetic construct; Dicamba decarboxylase variant
MAQGKVALEEHFAIPETLQDSAGFVPGDYWKELQHRLLDIQDTRLKLMDAHGIETMILSLAAPAVQAIPDRRKAIEIARRANDFLAEECAKRPDRFLAFAALPLQDPDAATEELQRCVNDLGFVGALVNGFSQEGDGQTPLYYDLPQYRPFWGEVEKLDVPFYLHPRNPLPQDSRIYDGHPWLLGPTWAFAQETAVHALRLMASGLFDERPRLNIILGHLGEGLPYMMYRIDHRIAWVHEPPRYPAKRRFMDYFNENFHITTSGNFRTQTLIDAILEIGADRILFSTDWPFENIDHAADWFNATSIAEADRVKIGRTNARRLFKLDGD

SEQ ID NO: 325 - protein, 328 aa, Artificial Sequence
  synthetic construct; Dicamba decarboxylase variant
MAQGKVALEEHFAIPETLQDSAGFVPGDYWKELQHRLLDIQDTRLKLMDAHGIETMILSLAAPAVQAIPDRRKAIEIARRANDFLAEECAKRPDRFLAFAALPLQDPDAATEELQRCVNDLGFVGALVNGFSVEGDGQTPLYYDLPQYRPFWGEVEKLDVPFYLHPRNPLPQDSRIYDGHPWLLGPTWAFAQETAVHALRLMASGLFDEHPRLNIILGHMGEGLPYMMYRIDHRIAWVKLPPRYPAKRRFMDYFNENFHITTSGNFRTQTLIDAILEIGADRILFSTDWPFENIDHAADWFNATSIAEADRVKIGRTNARRLFKLDGD

SEQ ID NO: 326 - protein, 328 aa, Artificial Sequence
  synthetic construct; Dicamba decarboxylase variant
MAQGKVALEEHFAIPETLNDSAGFVPGDYWKELQHRLLDIQDTRLKLMDAHGIETMILSLAAPAVQAIPDRRKAIEIARRANDFLAEECAKRPDRFLAFAALPLQDPDAATEELQRCVNDLGFVGALVNGFSQEGDGQTPLYYDLPQYRPFWGEVEKLDVPFYLHPRNPLPQDSRIYDGHPWLLGPTWAFAQETAVHALRLMASGLFDEHPRLNIILGHMGEGLPYMMYRIDHRIAWVKLPPRYPAKRRFMDYFNENFHITTSGNFRTQTLIDAILEIGADRILFSTDWPFENIDHATAWFNATSIAEADRLKIGRTNARRLFKLDLD

SEQ ID NO: 327 - protein, 328 aa, Artificial Sequence
  synthetic construct; Dicamba decarboxylase variant
MAQGKVALEEHFAIPETLNDSAGFVPGDYWKELQHRLLDIQDTRLKLMDAHGIETMILSLAAPAVQAIPDRRKAIEIARRANDFLAEECAKRPDRFLAFAALPLQDPDAATEELQRCVNTLGFVGALVNGFSQEGDGQTPLYYDLPQYRPFWGEVEKLDVPFYLHPRNPLPQDSRIYDGHPWLLGPTWAFAQETAVHALRLMASGLFDEHPRLNIILGHMGEGLPYMMYRIDHRIAWVHEPPRYPAKRRFMDYFNENFHITTSGNFRTQTLIDAILEIGADRILFSTDWPFENIDHAADWFNATSIAEADRLKIGRTNARRLFKLDLD

SEQ ID NO: 328 - protein, 328 aa, Artificial Sequence
  synthetic construct; Dicamba decarboxylase variant
MAQGKVALEEHFAIPETLHDSAGFVPGDYWKELQHRLLDIQDTRLKLMDAHGIETMILSLAAPAVQAIPDRRKAIEIARRANDFLAEECAKRPDRFLAFAALPLQDPDAASEELQRCVNDLGFVGALVNGFSREGDGQTPLYYDLPQYRPFWGEVEKLDVPFYLHPRNPLPQDSRIYDGHPWLLGPTWAFAQETAVHALRLMASGLFDEHPRLNIILGHMGEGLPYMMYRIDHRIAWVKLPPRYPAKRRFMDYFKENFHITTSGNFRTQTLIDAILEIGADRILFSTDWPFENIDHAADWFNATSIAEADRVKIGRTNARRLFKLDGD

SEQ ID NO: 329 - protein, 328 aa, Artificial Sequence
  synthetic construct; Dicamba decarboxylase variant
MAQGKVALEEHFAIPETLQDSAGFVPGDYWKELQHRLLDIQDTRLKLMDAHGIETMILSLAAVGVQAIPDRRKAIEIARRANDFLAEECAKRPDRFLAFAALPLQDPDAATEELQRCVNDLGFVGALVNGFSQEGDGQTPLYYDLPQYRPFWGEVEKLDVPFYLHPRNPLPQDSRIYDGHPWLLGPTWAFAQETAVHALRLMASGLFDEHPRLNIILGHMGEGLPYMMYRIDHRIAWVHEPPRYPAKRRFMDYFNENFHITTSGNFRTQTLIDAILEIGADRILFSTDWPFENIDHATDWFNATSIAEADRVKIGRTNARRLFKLDGD

SEQ ID NO: 330 - protein, 328 aa, Artificial Sequence
  synthetic construct; Dicamba decarboxylase variant
MAQGKVALEEHFAIPETLQDSAGFVPGDYWKELQHRLLDIQDTRLRLMDAHGIETMILSLAAPAVQAIPDRRKAIEIARRANDMLAEECAKRPDRFLAFAALPLQDPDAATEELQRCVNDLGFVGALVNGFSQEGDGQTPLYYDLPQYRPFWGEVEKLDVPFYLHPRNPLPQDSRIYDGHPWLLGPTWAFAQETAVHALRLMASGLFDEHPRLNIILGHMGEGLPYMMYRIDHRIAWVHEPPRYPAKRRFMDYFNENFHITTSGNFRTQTLIDAILEIGADRILFSTDWPFENIDHAADWFNATSIAEADRVKIGRTNARRLFKLDGD

SEQ ID NO: 331 - protein, 328 aa, Artificial Sequence
  synthetic construct; Dicamba decarboxylase variant
MAQGKVALEEHFAIPETLNDSAGFVPGDYWKELQHRLLDIQDTRLRLMDAHGIETMILSLAAPAVQAIPDRRKAIEIARRANDFLAEECAKRPDRFLAFAALPLQDPDAATEELQRCVNDLGFVGALVNGFSQEGDGQTPLYYDLPQYRPFWGEVEKLDVPFYLHPRNPLPQDSRIYDGHPWLLGPTWAFAQETAVHALRLMASGLFDEHPRLNIILGHLGEGLPYMMYRIDHRIAWVKLPPRYPAKRRFMDYFNENFHITTSGNFRTQTLIDAILEIGADRILFSTDWPFENIDHAADWFNATSIAEADRVKIGRTNARRLFKLDGA

SEQ ID NO: 332 - protein, 328 aa, Artificial Sequence
  synthetic construct; Dicamba decarboxylase variant
MAQGKVALEEHFAIPETLQDSAGFVPGDYWKELQHRLLDIQDTRLKLMDAHGIETMILSLAAPAVQAIPDRRKAIEIARRANDMLAEECAKRPDRFLAFAALPLQDPDAATEELQRTVNDLGFVGALVNGFSQEGDGQTPLYYDLPQYRPFWGEVEKLDVPFYLHPRNPLPQDSRIYDGHPWLLGPTWAFAQETAVHALRLMASGLFDEHPRLNIILGHMGEGLPYMMYRIDHRIAWVHEPPRYPAKRRFMDYFNENFHITTSGNFRTQTLIDAILEIGADRILFSTDWPFENIDHATAWFNATSIAEADRLKIGRTNARRLFKLDGD

SEQ ID NO: 333 - protein, 328 aa, Artificial Sequence
  synthetic construct; Dicamba decarboxylase variant
MAQGKVALEEHFAIPETLNDSAGFVPGDYWKELQHRLLDIQDTRLKLMDAHGIETMILSLAAPAVQAIPDRRKAIEIARRANDFLAEECAKRPDRFLAFAALPLQDPDAATEELQRCVNDLGFVGALVNGFSVEGDGQTPLYYDLPQYRPFWGEVEKLDVPFYLHPRNPLPQDSRIYDGHPWLLGPTWAFAQETAVHALRLMASGLFDEHPRLNIILGHMGEGLPYMMYRIDHRIAWVHEPPRYPAKRRFMDYFNENFHITTSGNFRTQTLIDAILEIGADRILFSTDWPFENIDHAADWFNATSIAEADRVKIGRTNARRLFKLDLD

SEQ ID NO: 334 - protein, 328 aa, Artificial Sequence
  synthetic construct; Dicamba decarboxylase variant
MAQGKVALEEHFAIPETLQDSAGFVPGDYWKELQHRLLDIQDTRLRLMDAHGIETMILSLAAPAVQAIPDRRKAIEIARRANDFLAEECAKRPDRFLAFAALPLQDPDAATEELQRCVNTLGFVGALVNGFSVEGDGQTPLYYDLPQYRPFWGEVEKLDVPFYLHPRNPLPQDSRIYDGHPWLLGPTWAFAQETAVHALRLMASGLFDEHPRLNIILGHLGEGLPYMMYRIDHRIAWVHEPPRYPAKRRFMDYFNENFHITTSGNFRTQTLIDAILEIGADRILFSTDWPFENIDHAADWFNATSIAEADRLKIGRTNARRLFKLDGA

SEQ ID NO: 335 - protein, 328 aa, Artificial Sequence
  synthetic construct; Dicamba decarboxylase variant
MAQGKVALEEHFAIPETLQDSAGFVPGDYWKELQHRLLDIQDTRLKLMDAHGIETMILSLAAPAVQAIPDRRKAIEIARRANDMLAEECAKRPDRFLAFAALPLQDPDAATEELQRCVNTLGFVGALVNGFSQEGDGQTPLYYDLPQYRPFWGEVEKLDVPFYLHPRNPLPQDSRIYDGHPWLLGPTWAFAQETAVHALRLMASGLFDEHPRLNIILGHMGEGLPYMMYRIDHRIAWVHEPPRYPAKRRFMDYFNENFHITTSGNFRTQTLIDAILEIGADRILFSTDWPFENIDHAADWFNATSIAEADRVKIGRTNARRLFKLDGD

SEQ ID NO: 336 - protein, 328 aa, Artificial Sequence
  synthetic construct; Dicamba decarboxylase variant
MAQGKVALEEHFAIPETLQDSAGFVPGDYWKELQHRLLDIQDTRLKLMDAHGIETMILSLAAVGVQAIPDRRKAIEIARRANDFLAEECAKRPDRFLAFAALPLQDPDAATEELQRCVNDLGFVGALVNGFSQEGDGQTPLYYDLPQYRPFWGEVEKLDVPFYLHPRNPLPQDSRIYDGHPWLLGPTWAFAQETAVHALRLMASGLFDEHPRLNIILGHLGEGLPYMMYRIDHRIAWVHEPPRYPAKRRFMDYFNENFHITTSGNFRTQTLIDAILEIGADRILFSTDWPFENIDHAADWFNATSIAEADRVKIGRTNARRLFKLDGA

SEQ ID NO: 337 - protein, 328 aa, Artificial Sequence
  synthetic construct; Dicamba decarboxylase variant
MAQGKVALEEHFAIPETLNDSAGFVPGDYWKELQHRLLDIQDTRLKLMDAHGIGTMILSLAAPAVQAIPDRRKAIEIARRANDFLAEECAKRPDRFLAFAALPLQDPDAATEELQRCVNDLGFVGALVNGFSQEGDGQTPLYYDLPQYRPFWGEVEKLDVPFYLHPRNPLPQDSRIYDGHPWLLGPTWAFAQETAVHALRLMASGLFDEHPRLNIILGHMGEGLPYMMYRIDHRIAWVHEPPRYPAKRRFMDYFNENFHITTSGNFRTQTLIDAILEIGADRILFSTDWPFENIDHATAWFNATSIAEADRLKIGRTNARRLFKLDGA

SEQ ID NO: 338 - protein, 328 aa, Artificial Sequence
  synthetic construct; Dicamba decarboxylase variant
MAQGKVALEEHFAIPETLNDSAGFVPGDYWKELQHRLLDIQDTRLKLMDAHGIETMILSLAAPAVQAIPDRRKAIEIARRANDFLAEECAKRPDRFLAFAALPLQDPDAATEELQRCVNDLGFVGALVNGFSQEGDGQTPLYYDLPQYRPFWGEVEKLDVPFYLHPRNPLPQDSRIYDGHPWLLGPTWAFAQETAVHALRLMASGLFDEHPRLNIILGHMGEGLPYMMYRIDHRIAWVKLPPRYPAKRRFMDYFNENFHITTSGNFRTQTLIDAILEIGADRILFSTDWPFENIDHAAAWFNATSIAEADRLKIGRTNARRLFKLDGA

SEQ ID NO: 339 - protein, 328 aa, Artificial Sequence
  synthetic construct; Dicamba decarboxylase variant
MAQGKVALEEHFAIPETLQDSAGFVPGDYWKELQHRLLDIQDTRLKLMDAHGIGTMILSLAAVGVQAIPDRRKAIEIARRANDFLAEECAKRPDRFLAFATLPLQDPDAATEELQRCVNNLGFVGALVNGFSQEGDGQTPLYYDLPQYRPFWGEVEKLDVPFYLHPRNPLPQDSRIYDGHPWLLGPTWAFVQETAVHALRLMASGLFDEHPRLNIILGHMGEGLPYMMYRIDHRIAWVKLPPRYPAKRRFMDYFNENFHITTSGNFRTQTLIDAILEIGADRILFSTDWPFENIDHAADWFNATSIAEADRVKIGRTNARRLFKLDGA

SEQ ID NO: 340 - protein, 328 aa, Artificial Sequence
  synthetic construct; Dicamba decarboxylase variant
MAQGKVALEEHFAIPETLQDSAGFVPGDYWKELQHRLLDIQDTRLRLMDAHGIETMILSLAAPAVQAIPDRRKAIEIARRANDFLAEECAKRPDRFLAFAALPLQDPDAATEELQRCVNDLGFVGALVNGFSQEGDGQTPLYYDLPQYRPFWGEVEKLDVPFYLHPRNPLPQDSRIYDGHPWLLGPTWAFAQETAVHALRLMASGLFDEHPRLNIILGHLGEGLPYMMYRIDHRIAWVKLPPRYPAKRRFMDYFNENFHITTSGNFRTQTLIDAILEIGADRILFSTDWPFENIDHAADWFNATSIAEADRVKIGRTNARRLFKLDGD

SEQ ID NO: 341 - protein, 328 aa, Artificial Sequence
  synthetic construct; Dicamba decarboxylase variant
MAQGKVALEEHFAIPETLQDSAGFVPGDYWKELQHRLLDIQDTRLKLMDAHGIETMILSLAAPGVQAIPDRRKAIEIARRANDILAEECAKRPDRFLAFAALPMQDPDAATEELQRCVNDLGFVGALVNGFSQEGDGQTPLYYDLPQYRPFWGEVEKLDVPFYLHPRNPLPQDSRIYDGHPWLLGPTWAFAQETAVHALRLMASGLFDEHPRLNIILGHMGEGLPYMMYRIDHRIAWVQEPPRYPAKRRFMDYFNENFHITTSGNFRTQTLIDAILEIGADRILFSTDWPFENIDHAADWFNATSIAEADRVKIGRTNARRLFKLDGD

SEQ ID NO: 342 - protein, 328 aa, Artificial Sequence
  synthetic construct; Dicamba decarboxylase variant
MAQGKVALEEHFAIPETLQDSAGFVPGDYWKELQHRLLDIQDTRLKLMDAHGIETMILSLAAPAVQAIPDRRKAIEIARRANDFLAEECAKRPDRFLAFAALPLQDPDAASEELQRCVNDLGFVGALVNGFSQEGDGQTPLYYDLPQYRPFWGEVEKLDVPFYLHPRNPLPQDSRTYDGHPWLLGPTWAFAQETAVHALRLMASGLFDEHPRLNIILGHMGEGLPYMMYRIDHRIAWVHEPPRYPAKRRFMDYFNENFHITTSGNFRTQTLIDAILEIGADRILFSTDWPFENIDHAADWFNATSIAEADRVKIGRTNARRLFKLDGD

SEQ ID NO: 343 - protein, 328 aa, Artificial Sequence
  synthetic construct; Dicamba decarboxylase variant
MAQGKVALEEHFAIPETLQDSAGFVPGDYWKELQHRLLDIQDTRLKLMDAHGIETMILSLAAPAVQAIPDRRKAIEIARRANDFLAEECAKRPDRFLAFAALPMQDPDAASEELQRTVNDLGFVGALVNGFSQEGDGQTPLYYDLPQYRPFWGEVEKLDVPFYLHPRNPLPQDSRIYDGHPWLLGPTWAFAQETAVHALRLMASGLFDEHPRLNIILGHMGEGLPYMMYRIDHRIAWVHEPPRYPAKRRFMDYFNENFHITTSGNFRTQTLIDAILEIGADRILFSTDWPFENIDHAADWFNATSIAEADRVKIGRTNARRLFKLDLD

SEQ ID NO: 344 - protein, 328 aa, Artificial Sequence
  synthetic construct; Dicamba decarboxylase variant
MAQGKVALEEHFAIPETLQDSAGFVPGDYWKELQHRLLDIQDTRLKLMDAHGIETMILSLAAPAVQAIPDRRKAIEIARRANDFLAEECAKRPDRFLAFAALPLQDPDAATEELQRCVNDLGFVGALVNGFSLEGDGQTPLYYDLPQYRPFWGEVEKLDVPFYLHPRNPLPQDSRIYDGHPWLLGPTWAFAQETAVHALRLMASGLFDEHPRLNIILGHMGEGLPYMMYRIDHRIAWVKLPPRYPAKRRFMDYFNENFHITTSGNFRTQTLIDAILEIGADRILFSTDWPFENIDHAADWFNATSIAEADRVKIGRTNARRLFKLDGD

SEQ ID NO: 345 - protein, 328 aa, Artificial Sequence
  synthetic construct; Dicamba decarboxylase variant
MAQGKVALEEHFAIPETLQDSAGFVPGDYWKELQHRLLDIQDTRLKLMDAHGIETMILSLAAPAVQAIPDRRKAIEIARRANDFLAEECAKRPDRFLAFAALPLQDPDAATEELQRCVNDLGFVGALVNGFSQEGDGQTPLYYDLPQYRPFWGEVEKLDVPFYLHPRNPLPQDSRIYDGHPWLLGPTWAFAQETAVHALRLMASGLFDEHPRLNIILGHLGEGLPYMMYRIDHRIAWVKLPPRYPAKRRFMDYFNENFHITTSGNFRTQTLIDAILEIGADRILFSTDWPFENIDHAADWFNATSIAEADRLKIGRTNARRLFKLDGA

SEQ ID NO: 346 - protein, 328 aa, Artificial Sequence
  synthetic construct; Dicamba decarboxylase variant
MAQGKVALEEHFAIPETLQDSAGFVPGDYWKELQHRLLDIQDTRLKLMDAHGIETMILSLAAPAVQAIPDRRKAIEIARRANDFLAEECAKRPDRFLAFAALPLQDVDAATEELQRCVNDLGFVGALVNGFSVEGDGQTPLYYDLPQYRPFWGEVEKLDVPFYLHPRNPLPQDSRIYDGHPWLLGPTWAFAQETAVHALRLMASGLFDEHPRLNIILGHLGEGLPYMMYRIDHRIAWVHEPPRYPAKRRFMDYFNENFHITTSGNFRTQTLIDAILEIGADRILFSTDWPFENIDHAADWFNATSIAEADRVKIGRTNARRLFKLDGD

SEQ ID NO: 347 - protein, 328 aa, Artificial Sequence
  synthetic construct; Dicamba decarboxylase variant
MAQGKVALEEHFAIPETLQDSAGFVPGDYWKELQHRLLDIQDTRLKLMDAHGIETMILSLAAPAVQAIPDRRKAIEIARRANDFLAEECAKRPDRFLAFAALPLQDPDAATEELQRCVNDLGFVGALVNGFSQEGDGQTPLYYDLPQYRPFWGEVEKLDVPFYLHPRNPLPQDSRIYDGHPWLLGPTWAFAQETAVHALRLMASGLFDEHPRLNIILGHLGEGLPYMMYRIDHRIAWVKLPPRYPAKRRFMDYFNENFHITTSGNFRTQTLIDAILEIGADRILFSTDWPFENIDHAADWFNATSIAEADRVKIGRTNARRLFKLDGD

SEQ ID NO: 348 - protein, 328 aa, Artificial Sequence
  synthetic construct; Dicamba decarboxylase variant
MAQGKVALEEHFAIPATLNDSAGFVPGDYWKELQHRLLDIQDTRLKLMDAHGIETMILSLAAPAVQAIPDRRKAIEIARRANDFLAEECAKRPDRFLAFAALPMQDPDAATEELQRCVNDLGFVGALVNGFSVEGDGQTPLYYDLPQYRPFWGEVEKLDVPFYLHPRNPLPQDSRIYDGHPWLLGPTWAFAQETAVHALRLMASGLFDEHPRLNIILGHMGEGLPYMMYRIDHRIAWVHPPPRYPAKRRFMDYFNENFHITTSGNFRTQTLIDAILEIGADRILFSTDWPFENIDHAADWFNATSIAEADRVKIGRTNARRLFKLDGD

SEQ ID NO: 349 - protein, 328 aa, Artificial Sequence
  synthetic construct; Dicamba decarboxylase variant
MAQGKVALEEHFAIPETLQDSAGFVPGDYWKELQHRLLDIQDTRLRLMDAHGIETMILSLAAPAVQAIPDRRKAIEIARRANDFLAEECAKRPDRFLAFAALPLQDPDAATEELQRCVNDLGFVGALVNGFSQEGDGQTPLYYDLPQYRPFWGEVEKLDVPFYLHPRNPLPQDSRIYDGHPWLLGPTWAFAQETAVHALRLMASGLFDEHPRLNIILGHMGEGLPYMMYRIDHRIAWVHEPPRYPAKRRFMDYFNENFHITTSGNFRTQTLIDAILEIGADRILFSTDWPFENIDHAADWFNATSIAEADRVKIGRTNARRLFKLDLD

SEQ ID NO: 350 - protein, 328 aa, Artificial Sequence
  synthetic construct; Dicamba decarboxylase variant
MAQGKVALEEHFAIPETLNDSAGFVPGDYWKELQHRLLDIQDTRLKLMDAHGIETMILSLAAPAVQAIPDRRKAIEIARRANDFLAEECAKRPDRFLAFAALPLQDPDAATEELQRCVNDLGFVGALVNGFSQEGDGQTPLYYDLPQYRPFWGEVEKLDVPFYLHPRNPLPQDSRIYDGHPWLLGPTWAFAQETAVHALRLMASGLFDEHPRLNIILGHMGEGLPYMMYRIDHRIAWVKLPPRYPAKRRFMDYFNENFHITTSGNFRTQTLIDAILEIGADRILFSTDWPFENIDHAADWFNATSIAEADRLKIGRTNARRLFKLDGA

SEQ ID NO: 351 - protein, 328 aa, Artificial Sequence
  synthetic construct; Dicamba decarboxylase variant
MAQGKVALEEHFAIPETLQDSAGFVPGDYWKELQHRLLDIQDTRLKLMDAHGIETMILSLAAPAVQAIPDRRKAIEIARRANDFLAEECAKRPDRFLAFAALPLQDPDAATEELQRTVNDLGFVGALVNGFSQEGDGQTPLYYDLPQYRPFWGEVEKLDVPFYLHPRNPLPQDSRIYDGHPWLLGPTWAFAQETAVHALRLMASGLFDEHPRLNIILGHLGEGLPYMMYRIDHRIAWVHEPPRYPAKRRFMDYFNENFHITTSGNFRTQTLIDAILEIGADRILFSTDWPFENIDHAADWFNATSIAEADRVKIGRTNARRLFKLDGD

SEQ ID NO: 352 - protein, 328 aa, Artificial Sequence
  synthetic construct; Dicamba decarboxylase variant
MAQGKVALEEHFAIPETLQDSAGFVPGDYWKELQHRLLDIQDTRLKLMDAHGIETMILSLAAPAVQAIPDRRKAIEIARRANDFLAEECAKRPDRFLAFAALPMQDPDAATEELQRTVNDLGFVGALVNGFSQEGDGQTPLYYDLPQYRPFWGEVEKLDVPFYLHPRNPLPQDSRIYDGHPWLLGPTWAFAQETAVHALRLMASGLFDEHPRLNIILGHLGEGLPYMMYRIDHRIAWVKLPPRYPAKRRFMDYFNENFHITTSGNFRTQTLIDAILEIGADRILFSTDWPFENIDHAADWFNATSIAEADRVKIGRTNARRLFKLDGD

SEQ ID NO: 353 - protein, 328 aa, Artificial Sequence
  synthetic construct; Dicamba decarboxylase variant
MAQGKVALEEHFAIPETLQDSAGFVPGDYWKELQHRLLDIQDTRLKLMDAHGIETMILSLAAPGVQAIPDRRKAIEIARRANDFLAEECAKRPDRFLAFAALPMQDVDAATEELQRCVNDLGFVGALVNGFSQEGDGQTPLYYDLPQYRPFWGEVEKLDVPFYLHPRNPLPQDSRIYDGHPWLLGPTWAFAQETAVHALRLMASGLFDEHPRLNIILGHMGEGLPYMMYRIDHRIAWVHEPPRYPAKRRFMDYFNENFHITTSGNFRTQTLIDAILEIGADRILFSTDWPFENIDHAADWFNATSIAEADRVKIGRTNARRLFKLDVD

SEQ ID NO: 354 - protein, 328 aa, Artificial Sequence
  synthetic construct; Dicamba decarboxylase variant
MAQGKVALEEHFAIPETLQDSAGFVPGDYWKELQHRLLDIQDTRLKLMDAHGIETMILSLAAPAVQAIPDRRKAIEIARRANDFLAEECAKRPDRFLAFAALPLQDPDAATEELQRCVNDLGFVGALVNGFSQEGDGQTPLYYDLPQYRPFWGEVEKLDVPFYLHPRNPLPQDSRIYDGHPWLLGPTWAFAQETAVHALRLMASGLFDEHPRLNIILGHMGEGLPYMMYRIDHRIAWVKLPPRYPAKRRFMDYFNENFHITTSGNFRTQTLIDAILEIGADRILFSTDWPFENIDHAAAWFNATSIAEADRVKIGRTNARRLFKLDGD

SEQ ID NO: 355 - protein, 328 aa, Artificial Sequence
  synthetic construct; Dicamba decarboxylase variant
MAQGKVALEEHFAIPETLNDSAGFVPGDYWKELQHRLLDIQDTRLKLMDAHGIETMILSLAAPAVQAIPDRRKAIEIARRANDFLAEECAKRPDRFLAFAALPLQDPDAASEELQRCVNDLGFVGALVNGFSQEGDGQTPLYYDLPQYRPFWGEVEKLDVPFYLHPRNPLPQDSRIYDGHPWLLGPTWAFAQETAVHALRLMASGLFDEHPRLNIILGHMGEGLPYMMYRIDHRIAWVKLPPRYPAKRRFMDYFNENFHITTSGNFRTQTLIDAILEIGADRILFSTDWPFENIDHATAWFNATSIAEADRLKIGRTNARRLFKLDLD

SEQ ID NO: 356 - protein, 328 aa, Artificial Sequence
  synthetic construct; Dicamba decarboxylase variant
MAQGKVALEEHFAIPETLQDSAGFVPGDYWKELQHRLLDIQDTRLKLMDAHGIETMILSLAAPAVQAIPDRRKAIEIARRANDMLAEECAKRPDRFLAFAALPLQDPDAATEELQRCVNDLGFVGALVNGFSVEGDGQTPLYYDLPQYRPFWGEVEKLDVPFYLHPRNPLPQDSRIYDGHPWLLGPTWAFAQETAVHALRLMASGLFDEHPRLNIILGHLGEGLPYMMYRIDHRIAWVHEPPRYPAKRRFMDYFNENFHITTSGNFRTQTLIDAILEIGADRILFSTDWPFENIDHAADWFNATSIAEADRLKIGRTNARRLFKLDGD

SEQ ID NO: 357 - protein, 328 aa, Artificial Sequence
  synthetic construct; Dicamba decarboxylase variant
MAQGKVALEEHFAIPETLQDSAGFVPGDYWKELQHRLLDIQDTRLKLMDAHGIETMILSLAAPAVQAIPDRRKAIEIARRANDFLAEECAKRPDRFLAFAALPLQDPDAASEELQRCVNDLGFVGALVNGFSVEGDGQTPLYYDLPQYRPFWGEVEKLDVPFYLHPRNPLPQDSRIYDGHPWLLGPTWAFAQETAVHALRLMASGLFDEHPRLNIILGHMGEGLPYMMYRIDHRIAWVHEPPRYPAKRRFMDYFNENFHITTSGNFRTQTLIDAILEIGADRILFSTDWPFENIDHAADWFNATSIAEADRVKIGRTNARRLFKLDLD

SEQ ID NO: 358 - protein, 328 aa, Artificial Sequence
  synthetic construct; Dicamba decarboxylase variant
MAQGKVALEEHFAIPETLQDSAGFVPGDYWKELQHRLLDIQDTRLKLMDAHGIETMILSLAAPAVQAIPDRRKAIEIARRANDFLAEECAKRPDRFLAFAALPLQDPDAATEELQRCVNDLGFVGALVNGFSVEGDGQTPLYYDLPQYRPFWGEVEKLDVPFYLHPRNPLPQDSRIYDGHPWLLGPTWAFAQETAVHALRLMASGLFDEHPRLNIILGHMGEGLPYMMYRIDHRIAWVKLPPRYPAKRRFMDYFNENFHITTSGNFRTQTLIDAILEIGADRILFSTDWPFENIDHATAWFNATSIAEADRLKIGRTNARRLFKLDGA

SEQ ID NO: 359 - protein, 328 aa, Artificial Sequence
  synthetic construct; Dicamba decarboxylase variant
MAQGKVALEEHFAIPETLNDSAGFVPGDYWKELQHRLLDIQDTRLKLMDAHGIETMILSLAAPAVQAIPDRRKAIEIARRANDFLAEECAKRPDRFLAFAALPLQDPDAATEELQRCVNDLGFVGALVNGFSQEGDGQTPLYYDLPQYRPFWGEVEKLDVPFYLHPRNPLPQDSRIYDGHPWLLGPTWAFAQETAVHALRLMASGLFDEHPRLNIILGHLGEGLPYMMYRIDHRIAWVKLPPRYPAKRRFMDYFNENFHITTSGNFRTQTLIDAILEIGADRILFSTDWPFENIDHAADWFNETSIAEADRVKIGRTNARRLFKLDGA

SEQ ID NO: 360 - protein, 328 aa, Artificial Sequence
  synthetic construct; Dicamba decarboxylase variant
MAQGKVALEEHFAIPETLQDSAGFVPGDYWKELQHRLLDIQDTRLKLMDAHGIETMILSLAAPAVQAIPDRRQAIEIARRANDFLAEECAKRPDRFLAFAALPLQDPDAATEELQRCVNDLGFVGALVNGFSVEGDGQTPLYYDLPQYRPFWGEVEKLDVPFYLHPRNPLPQDSRIYDGHPWLLGPTWAFAQETAVHALRLMASGLFDEHPRLNIILGHLGEGLPYMMYRIDHRIAWVKLPPRYPAKRRFMDYFNENFHITTSGNFRTQTLIDAILEIGADRILFSTDWPFENIDHAADWFNATSIAEADRLKIGRTNARRLFKLDGA

SEQ ID NO: 361 - protein, 328 aa, Artificial Sequence
  synthetic construct; Dicamba decarboxylase variant
MAQGKVALEEHFAIPETLQDSAGFVPGDYWKELQHRLLDIQDTRLKLMDAHGIETMILSLAAPAVQAIPDRRKAIEIARRANDFLAEECAKRPDRFLAFAALPLQDPDAATEELQRCVNDLGFVGALVNGFSQEGDGQTPLYYDLPQYRPFWGEVEKLDVPFYLHPRNPLPQDSRIYDGHPWLLGPTWAFAQETAVHALRLMASGLFDEHPRLNIILGHMGEGLPYMMYRIDHRIAWVKLPPRYPAKRRFMDYFNENFHITTSGNFRTQTLIDAILEIGADRILFSTDWPFENIDHAADWFNATSIAEADRLKIGRTNARRLFKLDGA

SEQ ID NO: 362 - protein, 328 aa, Artificial Sequence
  synthetic construct; Dicamba decarboxylase variant
MAQGKVALEEHFAIPETLQDSAGFVPGDYWKELQHRLLDIQDTRLKLMDAHGIETMILSLAAPAVQAIPDRRKAIEIARRANDMLAEECAKRPDRFLAFAALPLQDPDAATEELQRCVNDLGFVGALVNGFSQEGDGQTPLYYDLPQYRPFWGEVEKLDVPFYLHPRNPLPQDSRIYDGHPWLLGPTWAFAQETAVHALRLMASGLFDEHPRLNIILGHMGEGLPYMMYRIDHRIAWVHEPPRYPAKRRFMDYFNENFHITTSGNFRTQTLIDAILEIGADRILFSTDWPFENIDHAADWFNATSIAEADRVKIGRTNARRLFKLDLD

SEQ ID NO: 363 - protein, 328 aa, Artificial Sequence
  synthetic construct; Dicamba decarboxylase variant
MAQGKVALEEHFAIPETLQDSAGFVPGDYWKELQHRLLDIQDTRLKLMDAHGIETMILSLAAPGVQAIPDRRKAIEIARRANDILAEECAKRPDRFLAFAALPLQDPDAATEELQRCVNDLGFVGALVNGFSQEGDGQTPLYYDLPQYRPFWGEVEKLDVPFYLHPRNPLPQDSRIYDGHPWLLGPTWAFAQETAVHALRLMASGLFDEHPRLNIILGHMGEGLPYMMYRIDHRIAWVQEPPRYPAKRRFMDYFNENFHITTSGNFRTQTLIDAILEIGADRILFSTDWPFENIDHAADWFNATSIAEADRVKIGRTNARRLFKLDGA

SEQ ID NO: 364 - protein, 328 aa, Artificial Sequence
  synthetic construct; Dicamba decarboxylase variant
MAQGKVALEEHFAIPETLQDSAGFVPSEYLKELQHRLLDIQDTRLKLMDAHGIETMILSLAAPAVQAIPDRRKAIEIARRANDFLAEECAKRPDRFLAFAALPLQDPDAATEELQRTVNDLGFVGALVNGFSQEGDGQTPLYYDLPQYRPFWGEVEKLDVPFYLHPRNPLPQDSRIYDGHPWLLGPTWAFAQETAVHALRLMASGLFDEHPRLNIILGHMGEGLPYMMYRIDHRIAWVKLPPRYPAKRRFMDYFNENFHITTSGNFRTQTLIDAILEIGADRILFSTDWPFENIDHAADWFNATSIAEADRVKIGRTNARRLFKLDGA

SEQ ID NO: 365 - protein, 328 aa, Artificial Sequence
  synthetic construct; Dicamba decarboxylase variant
MAQGKVALEEHFAIPETLQDSAGFVPGDYWKELQHRLLDIQDTRLKLMDAHGIETMILSLAAPAVQAIPDRRKAIEIARRANDFLAEECAKRPDRFLAFAALPLQDPDAATEELQRCVNDLGFVGALVNGFSQEGDGQTPLYYDLPQYRPFWGEVEKLDVPFYLHPRNPLPQDSRIYDGHPWLLGPTWAFAQETAVHALRLMASGLFDEHPRLNIILGHMGEGLPYMMYRIDHRIAWVHEPPRYPAKRRFMDYFNENFHITTSGNFRTQTLIDAILEIGADRILFSTDWPFENIDHAADWFNATSIAEADRVKIGRTNARRLFKLDGA

SEQ ID NO: 366 - protein, 328 aa, Artificial Sequence
  synthetic construct; Dicamba decarboxylase variant
MAQGKVALEEHFAIPETLQDSAGFVPGDYWKELQHRLLDIQDTRLKLMDAHGIETMILSLAAPAVQAIPDRVQAIEIARRANDFLAEECAKRPDRFLAFAALPLQDPDAATEELQRCVNDLGFVGALVNGFSQEGDGQTPLYYDLPQYRPFWGEVEKLDVPFYLHPRNPLPQDSRIYDGHPWLLGPTWAFAQETAVHALRLMASGLFDEHPRLNIILGHMGEGLPYMMYRIDHRIAWVKLPPRYPAKRRFMDYFNENFHITTSGNFRTQTLIDAILEIGADRILFSTDWPFENIDHAADWFNATSIAEADRLKIGRTNARRLFKLDLD

SEQ ID NO: 367 - protein, 328 aa, Artificial Sequence
  synthetic construct; Dicamba decarboxylase variant
MAQGKVALEEHFAIPETLQDSAGFVPGDYWKELQHRLLDIQDTRLKLMDAHGIETMILSLAAPAVQAIPDRRKAIEIARRANDFLAEECAKRPDRFLAFAALPLQDPDAATEELQRTVNDLGFVGALVNGFSVEGDGQTPLYYDLPQYRPFWGEVEKLDVPFYLHPRNPLPQDSRIYDGHPWLLGPTWAFAQETAVHALRLMASGLFDEHPRLNIILGHMGEGLPYMMYRIDHRIAWVKLPPRYPAKRRFMDYFNENFHITTSGNFRTQTLIDAILEIGADRILFSTDWPFENIDHAADWFNATSIAEADRVKIGRTNARRLFKLDGD

SEQ ID NO: 368 - protein, 328 aa, Artificial Sequence
  synthetic construct; Dicamba decarboxylase variant
MAQGKVALEEHFAIPETLQDSAGFVPGDYWKELQHRLLDIQDTRLKLMDAHGIETMILSLAAPGVQAIPDRRKAIEIARRANDMLAEECAKRPDRFLAFAALPLQDVDAATEELQRCVNDLGFVGALVNGFSVEGDGQTPLYYDLPQYRPFWGEVEKLDVPFYLHPRNPLPQDSRIYDGHPWLLGPTWAFAQETAVHALRLMASGLFDEHPRLNIILGHMGEGLPYMMYRIDHRIAWVHEPPRYPAKRRFMDYFLENFHITTSGNFRTQTLIDAILEIGADRILFSTDWPFENIDHAADWFNATSIAEADRLKIGRTNARRLFKLDGD

SEQ ID NO: 369 - protein, 328 aa, Artificial Sequence
  synthetic construct; Dicamba decarboxylase variant
MAQGKVALEEHFAIPETLQDSAGFVPGDYWKELQHRLLDIQDTRLRLMDAHGIETMILSLAAPAVQAIPDRRKAIEIARRANDFLAEECAKRPDRFLAFAALPLQDPDAATEELQRCVNDLGFVGALVNGFSQEGDGQTPLYYDLPQYRPFWGEVEKLDVPFYLHPRNPLPQDSRIYDGHPWLLGPTWAFAQETAVHALRLMASGLFDEHPRLNIILGHMGEGLPYMMYRIDHRIAWVHEPPRYPAKRRFMDYFNENFHITTSGNFRTQTLIDAILEIGADRILFSTDWPFENIDHAADWFNATSIAEADRVKIGRTNARRLFKLDGA

SEQ ID NO: 370 - protein, 328 aa, Artificial Sequence
  synthetic construct; Dicamba decarboxylase variant
MAQGKVALEEHFAIPETLQDSAGFVPGDYWKELQHRLLDIQDTRLKLMDAHGIETMILSLAAPAVQAIPDRRKAIEIARRANDFLAEECAKRPDRFLAFAALPLQDVDAASEELQRCVNDLGFVGALVNGFSVEGDGQTPLYYDLPQYRPFWGEVEKLDVPFYLHPRNPLPQDSRIYDGHPWLLGPTWAFAQETAVHALRLMASGLFDEHPRLNIILGHMGEGLPYMMYRIDHRIAWVKLPPRYPAKRRFMDYFNENFHITTSGNFRTQTLIDAILEIGADRILFSTDWPFENIDHAADWFNATSIAEADRLKIGRTNARRLFKLDGD

SEQ ID NO: 371 - protein, 328 aa, Artificial Sequence
  synthetic construct; Dicamba decarboxylase variant
MAQGKVALEEHFAIPETLQDSAGFVPGDYWKELQHRLLDIQDTRLRLMDAHGIETMILSLAAPAVQAIPDRRKAIEIARRANDFLAEECAKRPDRFLAFAALPLQDPDAATEELQRTVNDLGFVGALVNGFSQEGDGQTPLYYDLPQYRPFWGEVEKLDVPFYLHPRNPLPQDSRIYDGHPWLLGPTWAFAQETAVHALRLMASGLFDEHPRLNIILGHLGEGLPYMMYRIDHRIAWVKLPPRYPAKRRFMDYFLENFHITTSGNFRTQTLIDAILEIGADRILFSTDWPFENIDHAADWFNATSIAEADRLKIGRTNARRLFKLDGR

SEQ ID NO: 372 - protein, 328 aa, Artificial Sequence
  synthetic construct; Dicamba decarboxylase variant
MAQGKVALEEHFAIPETLQDSAGFVPGDYWKELQHRLLDIQDTRLKLMDAHGIETMILSLAAPAVQAIPDRRKAIEIARRANDMLAEECAKRPDRFLAFAALPLQDPDAATEELQRCVNDLGFVGALVNGFSVEGDGQTPLYYDLPQYRPFWGEVEKLDVPFYLHPRNPLPQDSRIYDGHPWLLGPTWAFAQETAVHALRLMASGLFDEHPRLNIILGHLGEGLPYMMYRIDHRIAWVHEPPRYPAKRRFMDYFNENFHITTSGNFRTQTLIDAILEIGADRILFSTDWPFENIDHAADWFNATSIAEADRVKIGRTNARRLFKLDLD

SEQ ID NO: 373 - protein, 328 aa, Artificial Sequence
  synthetic construct; Dicamba decarboxylase variant
MAQGKVALEEHFAIPETLQDSAGFVPGDYWKELQHRLLDIQDTRLKLMDAHGIETMILSLAAPAVQAIPDRRKAIEIARRANDFLAEECAKRPDRFLAFAALPLQDPDAATEELQRCVNDLGFVGALVNGFSVEGDGQTPLYYDLPQYRPFWGEVEKLDVPFYLHPRNPLPQDSRIYDGHPWLLGPTWAFAQETAVHALRLMASGLFDEHPRLNIILGHMGEGLPYMMYRIDHRIAWVKLPPRYPAKRRFMDYFNENFHITTSGNFRTQTLIDAILEIGADRILFSTDWPFENIDHAADWFNATSIAEADRLKIGRTNARRLFKLDGD

SEQ ID NO: 374 - protein, 328 aa, Artificial Sequence
  synthetic construct; Dicamba decarboxylase variant
MAQGKVALEEHFAIPETLQDSAGFVPGDYWKELQHRLLDIQDTRLKLMDAHGIETMILSLAAPAVQAIPDRRKAIEIARRANDFLAEECAKRPDRFLAFAALPLQDPDAATEELQRCVNDLGFVGALVNGFSVEGDGQTPLYYDLPQYRPFWGEVEKLDVPFYLHPRNPLPQDSRIYDGHPWLLGPTWAFAQETAVHALRLMASGLFDEHPRLNIILGHMGEGLPYMMYRIDHRIAWVHEPPRYPAKRRFMDYFNENFHITTSGNFRTQTLIDAILEIGADRILFSTDWPFENIDHATDWFNATSIAEADRVKIGRTNARRLFKLDGD

SEQ ID NO: 375 - protein, 328 aa, Artificial Sequence
  synthetic construct; Dicamba decarboxylase variant
MAQGKVALEEHFAIPETLQDSAGFAPGDYWKELQHRLLDIQDTRLKLMDAHGIETMILSLAAPAVQAIPDRRKAIEIARRANDFLAEECAKRPDRFLAFAALPLQDPDAATEELQRCVNDLGFVGALVNGFSQEGDGQTPLYYDLPQYRPFWGEVEKLDVPFYLHPRNPLPQDSRIYDGHPWLLGPTWAFAQETAVHALRLMASGLFDEHPRLNIILGHLGEGLPYMMYRIDHRIAWVHEPPRYPAKRRFMDYFNENFHITTSGNFRTQTLIDAILEIGADRILFSTDWPFENIDHAADWFNATSIAEADRVKIGRTNARRLFKLDGD

SEQ ID NO: 376 - protein, 328 aa, Artificial Sequence
  synthetic construct; Dicamba decarboxylase variant
MAQGKVALEEHFAIPETLQDSAGFVPGDYWKELQHRLLDIQDTRLKLMDAHGIETMILSLAAPAVQAIPDRRKAIEIARRANDFLAEECAKRPDRFLAFAALPLQDPDAATEELQRTVNDLGFVGALVNGFSQEGDGQTPLYYDLPQYRPFWGEVEKLDVPFYLHPRNPLPQDSRIYDGHPWLLGPTWAFAQETAVHALRLMASGLFDEHPRLNIILGHMGEGLPYMMYRIDHRIAWVKLPPRYPAKRRFMDYFNENFHITTSGNFRTQTLIDAILEIGADRILFSTDWPFENIDHATDWFNATSIAEADRVKIGRTNARRLFKLDGA

SEQ ID NO: 377 - protein, 328 aa, Artificial Sequence
  synthetic construct; Dicamba decarboxylase variant
MAQGKVALEEHFAIPETLQDSAGFVPGDYWKELQHRLLDIQDTRLKLMDAHGIETMILSLAAPAVQAIPDRRKAIEIARRANDFLAEECAKRPDRFLAFAALPMQDPDAATEELQRCVNDLGFVGALVNGFSQEGDGQTPLYYDLPQYRPFWGEVEKLDVPFYLHPRNPLPQDSRIYDGHPWLLGPTWAFAQETAVHALRLMASGLFDEHPRLNIILGHMGEGLPYMMYRIDHRIAWVQEPPRYPAKRRFMDYFNENFHITTSGNFRTQTLIDAILEIGADRILFSTDWPFENIDHAADWFNATSIAEADRVKIGRTNARRLFKLDVD

SEQ ID NO: 378 - protein, 328 aa, Artificial Sequence
  synthetic construct; Dicamba decarboxylase variant
MAQGKVALEEHFAIPETLNDSAGFVPGDYWKELQHRLLDIQDTRLKLMDAHGIETMILSLAAPAVQAIPDRRKAIEIARRANDFLAEECAKRPDRFLAFAALPLQDPDAATEELQRCVNDLGFVGALVNGFSQEGDGQTPLYYDLPQYRPFWGEVEKLDVPFYLHPRNPLPQDSRIYDGHPWLLGPTWAFAQETAVHALRLMASGLFDEHPRLNIILGHLGEGLPYMMYRIDHRIAWVHEPPRYPAKRRFMDYFNENFHITTSGNFRTQTLIDAILEIGADRILFSTDWPFENIDHAAAWFNATSIAEADRVKIGRTNARRLFKLDGA

SEQ ID NO: 379 - protein, 328 aa, Artificial Sequence
  synthetic construct; Dicamba decarboxylase variant
MAQGKVALEEHFAIPETLQDTAGFVPGDYWKELQHRLLDIQDTRLKLMDAHGIETMILSLAAPAVQAIPDRRKAIEIARRANDFLAEECAKRPDRFLAFAALPLQDPDAATEELQRTVNDLGFVGALVNGFSQEGDGQTPLYYDLPQYRPFWGEVEKLDVPFYLHPRNPLPQDSRIYDGHPWLLGPTWAFAQETAVHALRLMASGLFDEHPRLNIILGHMGEGLPYMMYRIDHRIAWVKLPPRYPAKRRFMDYFNENFHITTSGNFRTQTLIDAILEIGADRILFSTDWPFENIDHAADWFNATSIAEADRVKIGRTNARRLFKLDGD

SEQ ID NO: 380 - protein, 328 aa, Artificial Sequence
  synthetic construct; Dicamba decarboxylase variant
MAQGKVALEEHFAIPETLQDAAGFVPGDYWKELQHRLLDIQDTRLKLMDKHEIETMILSLAAPAVQAIPDRRKAIEIARRANDFLAEEVAKRPDRFLAFAALPLQDPDAATEELQRCVNDLGFVGALVNGFSQEGDGQTPLYYDLPQYRPFWGEVEKLDVPFYLHPRNPLPQDSRIYDGHPWLLGPTWAFAQETAVHALRLMASGLFDEHPRLNIILGHMGEGLPYMMYRIDHRIAWVKAPPDYAAKRRFMDYFNENFHITTSGNFRTQTLIDAILEIGADRILFSTDWPFENIDHAADWFNATSIAEADRVKIGRTNARRLFKLDGR

SEQ ID NO: 381 - protein, 328 aa, Artificial Sequence
  synthetic construct; Dicamba decarboxylase variant
MAQGKVALEEHFAIPETLQDAAGFVPSDYWKELQHRLLDIQDTRLKLMDKHEIETMILSLAAPAVQAIPDRRKAIEIARRANDFLAEEVAKRPDRFLAFAALPLQDPDAATEELQRCVRDLGFVGALVNGFSVEGDGQTPLYYDLPQYRPFWKEVEKLDVPFYLHPRNPLPQDSRIYDGHPWLLGPTWAFAQETAVHALRLMASGLFDEHPRLNIILGHLGEGLPYMMYRIDHRIGWVKAPPDYPAKRRFMDYFLENFHITTSGNFRTQTLIDAILEIGADRILFSTDWPFENIDHAADWFNATSIAEADRLKIGRTNARRLFKLDLR

SEQ ID NO: 382 - protein, 328 aa, Artificial Sequence
  synthetic construct; Dicamba decarboxylase variant
MAQGKVALEEHFAIPETLNDAAGFVPGEYWKELQHRLLDIQDTRLKLMDKHEIETMILSLAAPAVQAIPDRRKAIEIARRANDFLAEEVAKRPDRFLAFAALPLQDPDAATEELQRCVRTLGFVGALVNGFSQEGDGQTPLYYDLPQYRPFWGEVEKLDVPFYLHPRNPLPQDSRIYDGHPWLLGPTWAFAQETAVHALRLMASGLFDEHPRLNIILGHLGEGLPYMMYRIDHRIGWVKAPPDYPAKRRFMDYFNENFHITTSGNFRTQTLIDAILEIGADRILFSTDWPFENIDHAAAWFNATSIAEADRLKIGRTNARRLFKLDLR

SEQ ID NO: 383 - protein, 328 aa, Artificial Sequence
  synthetic construct; Dicamba decarboxylase variant
MAQGKVALEEHFAIPETLQDAAGFVPGDYWKELQHRLLDIQDTRLKLMDKHEIGTMILSLAAPAVQAIPDRRKAIEIARRANDFLAEEVAKRPDRFLAFAALPLQDPDAATEELQRCVNDLGFVGAMVNGFSVEGDGQTPLYYDLPQYRPFWGEVEKLDVPFYLHPRNPLPQDSRIYDGHPWLLGPTWAFAQETAVHALRLMASGLFDEHPGLNIILGHLGEGLPYMMYRIDHRIGWVKAPPDYAAKRRFMDYFNENFHITTSGNFRTQTLIDAILEIGADRILFSTDWPFENIDHAAAWFNATSIAEADRVKIGRTNARRLFKLDLR

SEQ ID NO: 384 - protein, 328 aa, Artificial Sequence
  synthetic construct; Dicamba decarboxylase variant
MAQGKVALEEHFAIPETLQDAAGFVPGDYWKELQHRLLDIQDTRLKLMDKHEIGTMILSLAAPAVQAIPDRVKAIEIARRANDFLAEEVAKRPDRFLAFAALPLQDPDAATEELQRCVNDLGFVGAMVNGFSQEGDGQTPLYYDLPQYRPFWGEVEKLDVPFYLHPRNPLPQDSRIYDGHPWLLGPTWAFAQETAVHALRLMASGLFDEHPGLNIILGHMGEGLPYMMYRIDHRIAWVKAPPDYAAKRRFMDYFNENFHITTSGNFRTQTLIDAILEIGADRILFSTDWPFENIDHAAAWFNATSIAEADRVKIGRTNARRLFKLDLR

SEQ ID NO: 385 - protein, 328 aa, Artificial Sequence
  synthetic construct; Dicamba decarboxylase variant
MAQGKVALEEHFAIPETLQDAAGFVPGDYWKELQHRLLDIQDTRLKLMDKHEIETMILSLAAPAVQAIPDRRKAIEIARRANDFLAEEVAKRPDRFLAFAALPLQDVDAATEELQRCVNDLGFVGALVNGFSVEGDGQTPLYYDLPQYRPFWKEVEKLDVPFYLHPRNPLPQDSRIYDGHPWLLGPTWAFAQETAVHALRLMASGLFDEHPRLNIILGHLGEGLPYMMYRIDHRIGWVKAPPDYPAKRRFMDYFNENFHITTSGNFRTQTLIDAILEIGADRILFSTDWPFENIDHAAAWFNATSIAEADRLKIGRTNARRLFKLDLS

SEQ ID NO: 386 - protein, 328 aa, Artificial Sequence
  synthetic construct; Dicamba decarboxylase variant
MAQGKVALEEHFAIPETLQDAAGFVPGDYWKELQHRLLDIQDTRLKLMDKHEIETMILSLAAPAVQAIPDRRKAIEIARRANDFLAEEVAKRPDRFLAFAALPLQDPDAATEELQRCVNDLGFVGALVNGFSQEGDGQTPLYYDLPQYRPFWGEVEKLDVPFYLHPRNPLPQDSRIYDGHPWLLGPTWAFAQETAVHALRLMASGLFDEHPGLNIILGHMGEGLPYMMYRIDHRIAWVKAPPDYAAKRRFMDYFNENFHITTSGNFRTQTLIDAILEIGADRILFSTDWPFENIDHAADWFNATSIAEADRLKIGRTNARRLFKLDLR

SEQ ID NO: 387 - protein, 328 aa, Artificial Sequence
  synthetic construct; Dicamba decarboxylase variant
MAQGKVALEEHFAIPETLQDAAGFVPGDYWKELQHRLLDIQDTRLKLMDKHEIETMILSLAAPAVQAIPDRRKAIEIARRANDFLAEEVAKRPDRFLAFAALPLQDPDAATEELQRCVNDLGFVGALVNGFSQEGDGQTPLYYDLPQYRPFWKEVEKLDVPFYLHPRNPLPQDSRIYDGHPWLLGPTWAFAQETAVHALRLMASGLFDEHPRLNIILGHMGEGLPYMMYRIDHRIAWVKAPPDYAAKRRFMDYFNENFHITTSGNFRTQTLIDAILEIGADRILFSTDWPFENIDHAAAWFNATSIAEADRVKIGRTNARRLFKLDLR

SEQ ID NO: 388 - protein, 328 aa, Artificial Sequence
  synthetic construct; Dicamba decarboxylase variant
MAQGKVALEEHFAIPETLQDAAGFVPGDYWKELQHRLLDIQDQRLKLMDKHEIETMILSLAAPAVQAIPDRRKAIEIARRANDFLAEEVAKRPDRFLAFAALPLQDPDAATEELQRCVNDLGFVGALVNGFSQEGDGQTPLYYDLPQYRPFWGEVEKLDVPFYLHPRNPLPQDSRIYDGHPWLLGPTWAFAQETAVHALRLMASGLFDEHPGLNIILGHLGEGLPYMMYRIDHRIAWVKAPPDYAAKRRFMDYFNENFHITTSGNFRTQTLIDAILEIGADRILFSTDWPFENIDHAADWFNATSIAEADRVKIGRTNARRLFKLDLR

SEQ ID NO: 389 - protein, 328 aa, Artificial Sequence
  synthetic construct; Dicamba decarboxylase variant
MAQGKVALEEHFAIPETLQDAAGFVPGDYWKELQHRLLDIQDTRLKLMDKHEIETMILSLAAPAVQAIPDRRKAIEIARRANDFLAEEVAKRPDRFLAFAALPLQDPDAATEELQRCVNDLGFVGAMVNGFSVEGDGQTPLYYDLPQYRPFWGEVEKLDVPFYLHPRNPLPQDSRIYDGHPWLLGPTWAFAQETAVHALRLMASGLFDEHPGLNIILGHMGEGLPYMMYRIDHRIAWVKAPPDYAAKRRFMDYFNENFHITTSGNFRTQTLIDAILEIGADRILFSTDWPFENIDHAAAWFNATSIAEADRVKIGRTNARRLFKLDLR

SEQ ID NO: 390 - protein, 328 aa, Artificial Sequence
  synthetic construct; Dicamba decarboxylase variant
MAQGKVALEEHFAIPETLQDAAGFVPGDYWKELQHRLLDIQDTRLKLMDKHEIETMILSLAAPAVQAIPDRRKAIEIARRANDFLAEEVAKRPDRFLAFAALPLQDPDAATEELQRCVNDLGFVGAMVNGFSVEGDGQTPLYYDLPQYRPFWGEVEKLDVPFYLHPRNPLPQDSRIYDGHPWLLGPTWAFAQETAVHALRLMASGLFDEHPRLNIILGHMGEGLPYMMYRIDHRIAWVKAPPDYAAKRRFMDYFNENFHITTSGNFRTQTLIDAILEIGADRILFSTDWPFENIDHAAAWFNATSIAEADRLKIGRTNARRLFKLDLR

SEQ ID NO: 391 - protein, 328 aa, Artificial Sequence
  synthetic construct; Dicamba decarboxylase variant
MAQGKVALEEHFAIPETLQDAAGFVPGDYWKELQHRLLDIQDTRLKLMDKHEIETMILSLAAPAVQAIPDRRKAIEIARRANDFLAEEVAKRPDRFLAFAALPLQDPDAATEELQRCVNDLGFVGAMVNGFSVEGDGQTPLYYDLPQYRPFWGEVEKLDVPFYLHPRNPLPQDSRIYDGHPWLLGPTWAFAQETAVHALRLMASGLFDEHPRLNIILGHMGEGLPYMMYRIDHRIAWVKAPPDYAAKRRFMDYFNENFHITTSGNFRTQTLIDAILEIGADRILFSTDWPFENIDHAADWFNATSIAEADRVKIGRTNARRLFKLDLR

SEQ ID NO: 392 - protein, 328 aa, Artificial Sequence
  synthetic construct; Dicamba decarboxylase variant
MAQGKVALEEHFAIPETLQDAAGFVPGDYWKELQHRLLDIQDTRLKLMDKHEIETMILSLAAPAVQAIPDRRKAIEIARRANDFLAEEVAKRPDRFLAFAALPLQDPDAATEELQRCVNDLGFVGAMVNGFSQEGDGQTPLYYDLPQYRPFWGEVEKLDVPFYLHPRNPLPQDSRIYDGHPWLLGPTWAFAQETAVHALRLMASGLFDEHPRLNIILGHMGEGLPYMMYRIDHRIAWVKAPPDYAAKRRFMDYFNENFHITTSGNFRTQTLIDAILEIGADRILFSTDWPFENIDHAAAWFNATSIAEADRVKIGRTNARRLFKLDLR

SEQ ID NO: 393 - protein, 328 aa, Artificial Sequence
  synthetic construct; Dicamba decarboxylase variant
MAQGKVALEEHFAIPETLQDAAGFVPGDYWKELQHRLLDIQDTRLKLMDKHEIETMILSLAAPAVQAIPDRRKAIEIARRANDFLAEEVAKRPDRFLAFAALPLQDPDAATEELQRCVNDLGFVGAMVNGFSQEGDGQTPLYYDLPQYRPFWGEVEKLDVPFYLHPRNPLPQDSRIYDGHPWLLGPTWAFAQETAVHALRLMASGLFDEHPRLNIILGHLGEGLPYMMYRIDHRIAWVKAPPDYAAKRRFMDYFLENFHITTSGNFRTQTLIDAILEIGADRILFSTDWPFENIDHAADWFNATSIAEADRLKIGRTNARRLFKLDLR

SEQ ID NO: 394 - protein, 328 aa, Artificial Sequence
  synthetic construct; Dicamba decarboxylase variant
MAQGKVALEEHFAIPETLQDAAGFVPGDYWKELQHRLLDIQDTRLKLMDKHEIETMILSLAAPAVQAIPDRRKAIEIARRANDFLAEEVAKRPDRFLAFAALPLQDPDAATEELQRCVNDLGFVGALVNGFSQEGDGQTPLYYDLPQYRPFWGEVEKLDVPFYLHPRNPLPQDSRIYDGHPWLLGPTWAFAQETAVHALRLMASGLFDEHPRLNIILGHLGEGLPYMMYRIDHRIAWVKAPPDYAAKRRFMDYFNENFHITTSGNFRTQTLIDAILEIGADRILFSTDWPFENIDHAADWFNATSIAEADRVKIGRTNARRLFKLDLR

SEQ ID NO: 395 - protein, 328 aa, Artificial Sequence
  synthetic construct; Dicamba decarboxylase variant
MAQGKVALEEHFAIPETLQDAAGFVPGAYWKELQHRLLDIQDTRLKLMDKHEIETMILSLAAPAVQAIPDRRKAIEIARRANDFLAEEVAKRPDRFLAFAALPLQDPDAATEELQRCVNDLGFVGALVNGFSQEGDGQTPLYYDLPQYRPFWGEVEKLDVPFYLHPRNPLPQDSRIYDGHPWLLGPTWAFAQETAVHALRLMASGLFDEHPRLNIILGHMGEGLPYMMYRIDHRIAWVKAPPDYAAKRRFMDYFNENFHITTSGNFRTQTLIDAILEIGADRILFSTDWPFENIDHAAAWFNATSIAEADRLKIGRTNARRLFKLDGR

SEQ ID NO: 396 - protein, 328 aa, Artificial Sequence
  synthetic construct; Dicamba decarboxylase variant
MAQGKVALEEHFAIPETLQDAAGFVPGEYWKELQHRLLDIQDTRLKLMDKHEIETMILSLAAPAVQAIPDRRKAIEIARRANDFLAEEVAKRPDRFLAFAALPLQDPDAATEELQRTVNDLGFVGAMVNGFSQEGDGQTPLYYDLPQYRPFWGEVEKLDVPFYLHPRNPLPQDSRIYDGHPWLLGPTWAFAQETAVHALRLMASGLFDEHPRLNIILGHMGEGLPYMMYRIDHRIGWVKAPPDYAAKRRFMDYFNENFHITTSGNFRTQTLIDAILEIGADRILFSTDWPFENIDHAADWFNATSIAEADRVKIGRTNARRLFKLDGR

SEQ ID NO: 397 - protein, 328 aa, Artificial Sequence
  synthetic construct; Dicamba decarboxylase variant
MAQGKVALEEHFAIPETLQDAAGFVPGDYWKELQHRLLDIQDTRLKLMDKHEIETMILSLAAPAVQAIPDRRKAIEIARRANDFLAEEVAKRPDRFLAFAALPLQDPDAATEELQRCVNDLGFVGAMVNGFSQEGDGQTPLYYDLPQYRPFWGEVEKLDVPFYLHPRNPLPQDSRIYDGHPWLLGPTWAFAQETAVHALRLMASGLFDEHPRLNIILGHLGEGLPYMMYRIDHRIAWVKAPPDYAAKRRFMDYFNENFHITTSGNFRTQTLIDAILEIGADRILFSTDWPFENIDHAADWFNATSIAEADRVKIGRTNARRLFKLDLR

SEQ ID NO: 398 - protein, 328 aa, Artificial Sequence
  synthetic construct; Dicamba decarboxylase variant
MAQGKVALEEHFAIPETLQDAAGFVPGDYWKELQHRLLDIQDTRLKLMDKHEIETMILSLAAPAVQAIPDRRKAIEIARRANDFLAEEVAKRPDRFLAFAALPMQDPDAATEELQRCVRDLGFVGALVNGFSQEGDGQTPLYYDLPQYRPFWGEVEKLDVPFYLHPRNPLPQDSRIYDGHPWLLGPTWAFAQETAVHALRLMASGLFDEHPRLNIILGHMGEGLPYMMYRIDHRIGWVKAPPDYAAKRRFMDYFNENFHITTSGNFRTQTLIDAILEIGADRILFSTDWPFENIDHAADWFNATSIAEADRLKIGRTNARRLFKLDLR

SEQ ID NO: 399 - protein, 328 aa, Artificial Sequence
  synthetic construct; Dicamba decarboxylase variant
MAQGKVALEEHFAIPETLQDAAGFVPGDYWKELQHRLLDIQDTRLKLMDKHEIETMILSLAAPAVQAIPDRRKAIEIARRANDFLAEEVAKRPDRFLAFAALPLQDPDAATEELQRCVNDLGFVGAMVNGFSVEGDGQTPLYYDLPQYRPFWGEVEKLDVPFYLHPRNPLPQDSRIYDGHPWLLGPTWAFAQETAVHALRLMASGLFDEHPRLNIILGHMGEGLPYMMYRIDHRIGWVKAPPDYAAKRRFMDYFNENFHITTSGNFRTQTLIDAILEIGADRILFSTDWPFENIDHAADWFNATSIAEADRVKIGRTNARRLFKLDGR

SEQ ID NO: 400 - protein, 328 aa, Artificial Sequence
  synthetic construct; Dicamba decarboxylase variant
MAQGKVALEEHFAIPETLQDAAGFVPGDYWKELQHRLLDIQDTRLKLMDKHEIETMILSLAAPAVQAIPDRRKAIEIARRANDFLAEEVAKRPDRFLAFAALPLQDPDAATEELQRTVNDLGFVGAMVNGFSVEGDGQTPLYYDLPQYRPFWGEVEKLDVPFYLHPRNPLPQDSRIYDGHPWLLGPTWAFAQETAVHALRLMASGLFDEHPRLNIILGHLGEGLPYMMYRIDHRIAWVKAPPDYAAKRRFMDYFNENFHITTSGNFRTQTLIDAILEIGADRILFSTDWPFENIDHAADWFNATSIAEADRLKIGRTNARRLFKLDLR

SEQ ID NO: 401 - protein, 328 aa, Artificial Sequence
  synthetic construct; Dicamba decarboxylase variant
MAQGKVALEEHFAIPETLQDAAGFVPGDYWKELQHRLLDIQDTRLKLMDKHEIETMILSLAAPAVQAIPDRRKAIEIARRANDFLAEEVAKRPDRFLAFAALPLQDPDAATEELQRCVNDLGFVGALVNGFSQEGDGQTPLYYDLPQYRPFWGEVEKLDVPFYLHPRNPLPQDSRIYDGHPWLLGPTWAFAQETAVHALRLMASGLFDEHPRLNIILGHMGEGLPYMMYRIDHRIAWVKAPPDYAAKRRFMDYFNENFHITTSGNFRTQTLIDAILEIGADRILFSTDWPFENIDHAADWFNATSIAEADRLKIGRTNARRLFKLDLR

SEQ ID NO: 402 - protein, 328 aa, Artificial Sequence
  synthetic construct; Dicamba decarboxylase variant
MAQGKVALEEHFAIPETLQDAAGFVPGDYWKELQHRLLDIQDTRLKLMDKHEIETMILSLAAPAVQAIPDRRKAIEIARRANDFLAEEVAKRPDRFLAFAALPLQDPDAATEELQRTVNDLGFVGALVNGFSQEGDGQTPLYYDLPQYRPFWGEVEKLDVPFYLHPRNPLPQDSRIYDGHPWLLGPTWAFAQETAVHALRLMASGLFDEHPRLNIILGHLGEGLPYMMYRIDHRIAWVKAPPDYAAKRRFMDYFNENFHITTSGNFRTQALIDAILEIGADRILFSTDWPFENIDHAAAWFNATSIAEADRVKIGRTNARRLFKLDLR

SEQ ID NO: 403 - protein, 328 aa, Artificial Sequence
  synthetic construct; Dicamba decarboxylase variant
MAQGKVALEEHFAIPETLQDAAGFVPGDYWKELQHRLLDIQDTRLKLMDKHEIETMILSLAAPAVQAIPDRRKAIEIARRANDFLAEEVAKRPDRFLAFAALPLQDPDAATEELQRCVNDLGFVGAMVNGFSVEGDGQTPLYYDLPQYRPFWGEVEKLDVPFYLHPRNPLPQDSRIYDGHPWLLGPTWAFAQETAVHALRLMASGLFDEHPRLNIILGHMGEGLPYMMYRIDHRIAWVKAPPDYAAKRRFMDYFNENFHITTSGNFRTQTLIDAILEIGADRILFSTDWPFENIDHAADWFNATSIAEADRLKIGRTNARRLFKLDGR

SEQ ID NO: 404 - protein, 328 aa, Artificial Sequence
  synthetic construct; Dicamba decarboxylase variant
MAQGKVALEEHFAIPETLQDAAGFVPGDYWKELQHRLLDIQDTRLKLMDKHEIETMILSLAAPAVQAIPDRRKAIEIARRANDFLAEEVAKRPDRFLAFAALPLQDPDAATEELQRTVNDLGFVGAMVNGFSQEGDGQTPLYYDLPQYRPFWGEVEKLDVPFYLHPRNPLPQDSRIYDGHPWLLGPTWAFAQETAVHALRLMASGLFDEHPRLNIILGHLGEGLPYMMYRIDHRIGWVKAPPDYPAKRRFMDYFNENFHITTSGNFRTQTLIDAILEIGADRILFSTDWPFENIDHAAAWFNATSIAEADRVKIGRTNARRLFKLDLR

SEQ ID NO: 405 - protein, 328 aa, Artificial Sequence
  synthetic construct; Dicamba decarboxylase variant
MAQGKVALEEHFAIPETLQDAAGFVPGDYWKELQHRLLDIQDTRLKLMDKHEIETMILSLAAPAVQAIPDRRKAIEIARRANDFLAEEVAKRPDRFLAFAALPLQDPDAATEELQRCVNDLGFVGAMVNGFSQEGDGQTPLYYDLPQYRPFWGEVEKLDVPFYLHPRNPLPQDSRIYDGHPWLLGPTWAFAQETAVHALRLMASGLFDEHPRLNIILGHMGEGLPYMMYRIDHRIAWVKAPPDYAAKRRFMDYFNENFHITTSGNFRTQTLIDAILEIGADRILFSTDWPFENIDHAADWFNATSIAEADRVKIGRTNARRLFKLDLR

SEQ ID NO: 406 - protein, 328 aa, Artificial Sequence
  synthetic construct; Dicamba decarboxylase variant
MAQGKVALEEHFAIPETLQDAAGFVPGDYWKELQHRLLDIQDQRLKLMDKHEIETMILSLAAPAVQAIPDRRKAIEIARRANDFLAEEVAKRPDRFLAFAALPLQDPDAATEELQRCVNDLGFVGAMVNGFSQEGDGQTPLYYDLPQYRPFWGEVEKLDVPFYLHPRNPLPQDSRIYDGHPWLLGPTWAFAQETAVHALRLMASGLFDEHPRLNIILGHMGEGLPYMMYRIDHRIAWVKAPPDYAAKRRFMDYFNENFHITTSGNFRTQTLIDAILEIGADRILFSTDWPFENIDHAADWFNATSIAEADRVKIGRTNARRLFKLDGR

SEQ ID NO: 407 - protein, 328 aa, Artificial Sequence
  synthetic construct; Dicamba decarboxylase variant
MAQGKVALEEHFAIPETLQDAAGFVPGDYWKELQHRLLDIQDTRLKLMDKHEIETMILSLAAPAVQAIPDRRKAIEIARRANDFLAEEVAKRPDRFLAFAALPLQDPDAATEELQRCVNDLGFVGAMVNGFSQEGDGQTPLYYDLPQYRPFWGEVEKLDVPFYLHPRNPLPQDSRIYDGHPWLLGPTWAFAQETAVHALRLMASGLFDEHPGLNIILGHMGEGLPYMMYRIDHRIAWVKAPPDYPAKRRFMDYFNENFHITTSGNFRTQTLIDAILEIGADRILFSTDWPFENIDHAAAWFNATSIAEADRLKIGRTNARRLFKLDGR

SEQ ID NO: 408 - protein, 328 aa, Artificial Sequence
  synthetic construct; Dicamba decarboxylase variant
MAQGKVALEEHFAIPETLQDAAGFVPGDYWKELQHRLLDIQDTRLKLMDKHEIGTMILSLAAPAVQAIPDRRKAIEIARRANDFLAEEVAKRPDRFLAFAALPLQDPDAATEELQRCVNDLGFVGAMVNGFSVEGDGQTPLYYDLPQYRPFWGEVEKLDVPFYLHPRNPLPQDSRIYDGHPWLLGPTWAFAQETAVHALRLMASGLFDEHPRLNIILGHMGEGLPYMMYRIDHRIAWVKAPPDYPAKRRFMDYFNENFHITTSGNFRTQTLIDAILEIGADRILFSTDWPFENIDHAAAWFNATPIAEADRVKIGRTNARRLFKLDGR

SEQ ID NO: 409 - protein, 328 aa, Artificial Sequence
  synthetic construct; Dicamba decarboxylase variant
MAQGKVALEEHFAIPETLNDAAGFVPSEYWKELQHRLLDIQDTRLKLMDKHEIGTMILSLAAPAVQAIPDRRKAIEIARRANDFLAEEVAKRPDRFLAFAALPLQDPDAATEELQRCVNDLGFVGAMVNGFSQEGDGQTPLYYDLPQYRPFWGEVEKLDVPFYLHPRNPLPQDSRIYDGHPWLLGPTWAFAQETAVHALRLMASGLFDEHPRLNIILGHMGEGLPYMMYRIDHRIAWVKAPPDYPAKRRFMDYFNENFHITTSGNFRAQTLIDAILEIGADRILFSTDWPFENIDHAADWFNATSIAEADRLKIGRTNARRLFKLDGR

SEQ ID NO: 410 - protein, 328 aa, Artificial Sequence
  synthetic construct; Dicamba decarboxylase variant
MAQGKVALEEHFAIPETLQDAAGFVPGDYWKELQHRLLDIQDTRLKLMDKHEIETMILSLAAPAVQAIPDRRKAIEIARRANDFLAEEVAKRPDRFLAFAALPLQDPDAATEELQRCVNDLGFVGAMVNGFSQEGDGQTPLYYDLPQYRPFWKEVEKLDVPFYLHPRNPLPQDSRIYDGHPWLLGPTWAFAQETAVHALRLMASGLFDEHPRLNIILGHLGEGLPYMMYRIDHRIAWVKAPPDYAAKRRFMDYFNENFHITTSGNFRTQTLIDAILEIGADRILFSTDWPFENIDHAAAWFNATSIAEADRVKIGRTNARRLFKLDGR

SEQ ID NO: 411 - protein, 328 aa, Artificial Sequence
  synthetic construct; Dicamba decarboxylase variant
MAQGKVALEEHFAIPETLQDAAGFVPGDYWKELQHRLLDIQDTRLKLMDKHEIETMILSLAAPAVQAIPDRRKAIEIARRANDFLAEEVAKRPDRFLAFAALPLQDPDAATEELQRCVNDLGFVGAMVNGFSQEGDGQTPLYYDLPQYRPFWGEVEKLDVPFYLHPRNPLPQDSRIYDGHPWLLGPTWAFAQETAVHALRLMASGLFDEHPRLNIILGHMGEGLPYMMYRIDHRIAWVKAPPDYAAKRRFMDYFNENFHITTSGNFRTQTLIDAILEIGADRILFSTDWPFENIDHAADWFNATSIAEADRVKIGRTNARRLFKLDGR

SEQ ID NO: 412 - protein, 328 aa, Artificial Sequence
  synthetic construct; Dicamba decarboxylase variant
MAQGKVALEEHFAIPETLQDAAGFVPGDYWKELQHRLLDIQDTRLKLMDKHEIETMILSLAAPAVQAIPDRRKAIEIARRANDFLAEEVAKRPDRFLAFAALPLQDPDAATEELQRCVRDLGFVGAMVNGFSVEGDGQTPLYYDLPQYRPFWKEVEKLDVPFYLHPRNPLPQDSRIYDGHPWLLGPTWAFAQETAVHALRLMASGLFDEHPRLNIILGHMGEGLPYMMYRIDHRIAWVKAPPDYAAKRRFMDYFNENFHITTSGNFRTQTLIDAILEIGADRILFSTDWPFENIDHAAAWFNATSIAEADRVKIGRTNARRLFKLDLR

SEQ ID NO: 413 - protein, 328 aa, Artificial Sequence
  synthetic construct; Dicamba decarboxylase variant
MAQGKVALEEHFAIPETLQDAAGFVPGDYWKELQHRLLDIQDTRLRLMDKHEIETMILSLAAPAVQAIPDRRKAIEIARRANDFLAEEVAKRPDRFLAFAALPLQDPDAATEELQRCVRDLGFVGAMVNGFSQEGDGQTPLYYDLPQYRPFWGEVEKLDVPFYLHPRNPLPQDSRIYDGHPWLLGPTWAFAQETAVHALRLMASGLFDEHPRLNIILGHMGEGLPYMMYRIDHRIAWVKAPPDYAAKRRFMDYFNENFHITTSGNFRTQTLIDAILEIGADRILFSTDWPFENIDHAADWFNATSIAEADRVKIGRTNARRLFKLDLR

SEQ ID NO: 414 - protein, 328 aa, Artificial Sequence
  synthetic construct; Dicamba decarboxylase variant
MAQGKVALEEHFAIPETLQDAAGFVPGDYWKELQHRLLDIQDTRLKLMDKHEIETMILSLAAPAVQAIPDRRKATEIARRANDFLAEEVAKRPDRFLAFAALPLQDPDAATEELQRCVNDLGFVGALVNGFSQEGDGQTPLYYDLPQYRPFWGEVEKLDVPFYLHPRNPLPQDSRIYDGHPWLLGPTWAFAQETAVHALRLMASGLFDEHPRLNIILGHLGEGLPYMMYRIDHRIAWVKAPPDYAAKRRFMDYFNENFHITTSGNFRTQTLIDAILEIGADRILFSTDWPFENIDHAADWFNATSIAEADRVKIGRTNARRLFKLDLR

SEQ ID NO: 415 - protein, 328 aa, Artificial Sequence
  synthetic construct; Dicamba decarboxylase variant
MAQGKVALEEHFAIPETLNDAAGFVPGDYWKELQHRLLDIQDTRLKLMDKHEIETMILSLAAPAVQAIPDRRKAIEIARRANDFLAEEVAKRPDRFLAFAALPMQDPDAATEELQRCVRDLGFVGALVNGFSQEGDGQTPLYYDLPQYRPFWGEVEKLDVPFYLHPRNPLPQDSRIYDGHPWLLGPTWAFAQETAVHALRLMASGLFDEHPGLNIILGHMGEGLPYMMYRIDHRIGWVKAPPDYPAKRRFMDYFLENFHITTSGNFRTQTLIDAILEIGADRILFSTDWPFENIDHAAAWFNATSIAEADRLKIGRTNARRLFKLDLR

SEQ ID NO: 416 - protein, 328 aa, Artificial Sequence
  synthetic construct; Dicamba decarboxylase variant
MAQGKVALEEHFAIPETLQDAAGFVPGDYWKELQHRLLDIQDTRLKLMDKHEIETMILSLAAPAVQAIPDRRKAIEIARRANDFLAEEVAKRPDRFLAFAALPLQDPDAATEELQRCVNDLGFVGALVNGFSQEGDGQTPLYYDLPQYRPFWGEVEKLDVPFYLHPRNPLPQDSRIYDGHPWLLGPTWAFAQETAVHALRLMASGLFDEHPRLNIILGHMGEGLPYMMYRIDHRIAWVKAPPDYPAKRRFMDYFNENFHITTSGNFRTQTLIDAILEIGADRILFSTDWPFENIDHAADWFNATSIAEADRVKIGRTNARRLFKLDGR

SEQ ID NO: 417 - protein, 328 aa, Artificial Sequence
  synthetic construct; Dicamba decarboxylase variant
MAQGKVALEEHFAIPETLNDAADFVPGDYWKELQHRLLDIQDTRLKLMDKHEIETMILSLAAPAVQAIPDRVKAIEIARRANDFLAEEVAKRPDRFLAFAALPLQDVDAATEELQRCVNDLGFVGAMVNGFSQEGDGQTPLYYDLPQYRPFWGEVEKLDVPFYLHPRNPLPQDSRIYDGHPWLLGPTWAFAQETAVHALRLMASGLFDEHPRLNIILGHMGEGLPYMMYRIDHRIAWVKAPPDYPAKRRFMDYFLENFHITTSGNFRTQTLIDAILEIGADRILFSTDWPFENIDHAADWFNATSIAEADRVKIGRTNARRLFKLDGR

SEQ ID NO: 418 - protein, 328 aa, Artificial Sequence
  synthetic construct; Dicamba decarboxylase variant
MAQGKVALEEHFAIPETLQDAAGFVPGDYWKELQHRLLDIQDTRLKLMDKHEIETMILSLAAPAVQAIPDRRKAIEIARRANDFLAEEVAKRPDRFLAFAALPLQDPDAATEELQRCVNDLGFVGAMVNGFSQEGDGQTPLYYDLPQYRPFWGEVEKLDVPFYLHPRNPLPQDSRIYDGHPWLLGPTWAFAQETAVHALRLMASGLFDEHPRLNIILGHMGEGLPYMMYRIDHRIAWVKAPPDYPAKRRFMDYFNENFHITTSGNFRTQTLIDAILEIGADRILFSTDWPFENIDHAADWFNATSIAEADRVKIGRTNARRLFKLDGR

SEQ ID NO: 419 - protein, 328 aa, Artificial Sequence
  synthetic construct; Dicamba decarboxylase variant
MAQGKVALEEHFAIPETLQDAAGFVPGDYWKELQHRLLDIQDTRLKLMDKHEIETMILSLAAPAVQAIPDRRKAIEIARRANDFLAEEVAKRPDRFLAFAALPLQDPDAATEELQRCVNDLGFVGAMVNGFSQEGDGQTPLYYDLPQYRPFWGEVEKLDVPFYLHPRNPLPQDSRIYDGHPWLLGPTWAFAQETAVHALRLMASGLFDEHPRLNIILGHMGEGLPYMMYRIDHRIAWVEAPPDYPAKRRFMDYFNENFHITTSGNFRTQTLIDAILEIGADRILFSTDWPFENIDHAADWFNATSIAEADRVKIGRTNARRLFKLDGR

SEQ ID NO: 420 - protein, 328 aa, Artificial Sequence
  synthetic construct; Dicamba decarboxylase variant
MAQGKVALEEHFAIPETLNDAAGFVPGDYWKELQHRLLDIQDTRLKLMDKHEIETMILSLAAPAVQAIPDRVKAIEIARRANDFLAEEVAKRPDRFLAFAALPLQDVDAATEELQRCVNDLGFVGAMVNGFSQEGDGQTPLYYDLPQYRPFWGEVEKLDVPFYLHPRNPLPQDSRIYDGHPWLLGPTWAFAQETAVHALRLMASGLFDEHPRLNIILGHMGEGLPYMMYRIDHRIAWVKAPPDYPAKRRFMDYFNENFHITTSGNFRTQTLIDAILEIGADRILFSTDWPFENIDHAADWFNATSIAEADRVKIGRTNARRLFKLDGR

SEQ ID NO: 421 - protein, 328 aa, Artificial Sequence
  synthetic construct; Dicamba decarboxylase variant
MAQGKVALEEHFAIPETLQDAAGFVPGDYWKELQHRLLDIQDTRLKLMDKHEIGTMILSLAAPAVQAIPDRRKAIEIARRANDFLAEEVAKRPDRFLAFAALPLQDVDAATEELQRCVNDLGFVGAMVNGFSQEGDGQTPLYYDLPQYRPFWGEVEKLDVPFYLHPRNPLPQDSRIYDGHPWLLGPTWAFAQETAVHALRLMASGLFDEHPRLNIILGHMGEGLPYMMYRIDHRIAWVKAPPDYPAKRRFMDYFLENFHITTSGNFRTQTLIDAILEIGADRILFSTDWPFENIDHAADWFNATSIAEADRVKIGRTNARRLFKLDGR

SEQ ID NO: 422 - protein, 328 aa, Artificial Sequence
  synthetic construct; Dicamba decarboxylase variant
MAQGKVALEEHFAIPETLQDAAGFVPGDYWKELQHRLLDIQDTRLKLMDKHEIETMILSLAAPAVQAIPDRVKAIEIARRANDFLAEEVAKRPDRFLAFAALPLQDPDAATEELQRCVNDLGFVGAMVNGFSQEGDGQTPLYYDLPQYRPFWGEVEKLDVPFYLHPRNPLPQDSRIYDGHPWLLGPTWAFAQETAVHALRLMASGLFDEHPRLNIILGHMGEGLPYMMYRIDHRIAWVKAPPDYPAKRRFMDYFNENFHITTSGNFRTQTLIDAILEIGADRILFSTDWPFENIDHAADWFNATSIAEADRVKIGRTNARRLFKLDGR

SEQ ID NO: 423 - protein, 328 aa, Artificial Sequence
  synthetic construct; Dicamba decarboxylase variant
MAQGKVALEEHFAIPETLNDAAGFVPGDYWKELQHRLLDIQDTRLKLMDKHEIETMILSLAAPAVQAIPDRRKAIEIARRANDFLAEEVAKRPDRFLAFAALPLQDVDAATEELQRCVNDLGFVGAMVNGFSQEGDGQTPLYYDLPQYRPFWGEVEKLDVPFYLHPRNPLPQDSRIYDGHPWLLGPTWAFAQETAVHALRLMASGLFDEHPRLNIILGHMGEGLPYMMYRIDHRIAWVKAPPDYPAKRRFMDYFNENFHITTSGNFRTQTLIDAILEIGADRILFSTDWPFENIDHAADWFNATSIAEADRVKIGRTNARRLFKLDGR

SEQ ID NO: 424 - protein, 328 aa, Artificial Sequence
  synthetic construct; Dicamba decarboxylase variant
MAQGKVALEEHFAIPETLQDAAGFVPGDYWKELQHRLLDIQDTRLKLMDKHEIETMILSLAAPAVQAIPDRVKAIEIARRANDFLAEEVAKRPDRFLAFAALPLQDVDAATEELQRCVNDLGFVGAMVNGFSQEGDGQTPLYYDLPQYRPFWGEVEKLDVPFYLHPRNPLPQDSRIYDGHPWLLGPTWAFAQETAVHALRLMASGLFDEHPRLNIILGHMGEGLPYMMYRIDHRIAWVKAPPDYPAKRRFMDYFNENFHITTSGNFRTQTLIDAILEIGADRILFSTDWPFENIDHAADWFNATSIAEADRVKIGRTNARRLFKLDGR

SEQ ID NO: 425 - protein, 328 aa, Artificial Sequence
  synthetic construct; Dicamba decarboxylase variant
MAQGKVALEEHFAIPETLNDAADFVPSEYWKELQHRLLDIQDTRLKLMDKHEIETMILSLAAPAVQAIPDRRKAIEIARRANDFLAEEVAKRPDRFLAFAALPLQDPDAATEELQRCVNDLGFVGAMVNGFSQEGDGQTPLYYDLPQYRPFWGEVEKLDVPFYLHPRNPLPQDSRIYDGHPWLLGPTWAFAQETAVHALRLMASGLFDEHPRLNIILGHMGEGLPYMMYRIDHRIAWVKAPPDYPAKRRFMDYFNENFHITTSGNFRTQTLIDAILEIGADRILFSTDWPFENIDHAADWFNATSIAEADRVKIGRTNARRLFKLDGR

SEQ ID NO: 426 - protein, 328 aa, Artificial Sequence
  synthetic construct; Dicamba decarboxylase variant
MAQGKVALEEHFAIPETLQDAAGFVPGDYWKELQHRLLDIQDTRLKLMDKHEIGTMILSLAAPAVQAIPDRVKAIEIARRANDFLAEEVAKRPDRFLAFAALPLQDPDAATEELQRCVNDLGFVGALVNGFSQEGDGQTPLYYDLPQYRPFWGEVEKLDVPFYLHPRNPLPQDSRIYDGHPWLLGPTWAFAQETAVHALRLMASGLFDEHPRLNIILGHMGEGLPYMMYRIDHRIAWVKAPPDYPAKRRFMDYFLENFHITTSGNFRTQTLIDAILEIGADRILFSTDWPFENIDHAADWFNATSIAEADRVKIGRTNARRLFKLDGR

SEQ ID NO: 427 - protein, 328 aa, Artificial Sequence
  synthetic construct; Dicamba decarboxylase variant
MAQGKVALEEHFAIPETLQDAAGFVPGDYWKELQHRLLDIQDTRLKLMDKHEIETMILSLAAPAVQAIPDRVKAIEIARRANDFLAEEVAKRPDRFLAFAALPLQDVDAATEELQRCVNDLGFVGAMVNGFSQEGDGQTPLYYDLPQYRPFWGEVEKLDVPFYLHPRNPLPQDSRIYDGHPWLLGPTWAFAQETAVHALRLMASGLFDEHPRLNIILGHMGEGLPYMMYRIDHRIAWVKAPPDYPAKRRFMDYFLENFHITTSGNFRTQTLIDAILEIGADRILFSTDWPFENIDHAADWFNATSIAEADRVKIGRTNARRLFKLDGR

SEQ ID NO: 428 - protein, 328 aa, Artificial Sequence
  synthetic construct; Dicamba decarboxylase variant
MAQGKVALEEHFAIPETLQDAAGFVPGDYWKELQHRLLDIQDTRLKLMDKHEIGTMILSLAAPAVQAIPDRRKAIEIARRANDFLAEEVAKRPDRFLAFAALPLQDVDAATEELQRCVNDLGFVGALVNGFSQEGDGQTPLYYDLPQYRPFWGEVEKLDVPFYLHPRNPLPQDSRIYDGHPWLLGPTWAFAQETAVHALRLMASGLFDEHPRLNIILGHMGEGLPYMMYRIDHRIAWVKAPPDYPAKRRFMDYFNENFHITTSGNFRTQTLIDAILEIGADRILFSTDWPFENIDHAADWFNATSIAEADRVKIGRTNARRLFKLDGR

SEQ ID NO: 429 - protein, 328 aa, Artificial Sequence
  synthetic construct; Dicamba decarboxylase variant
MAQGKVALEEHFAIPETLQDAAGFVPGDYWKELQHRLLDIQDTRLKLMDKHEIETMILSLAAPAVQAIPDRRKAIEIARRANDFLAEEVAKRPDRFLAFAALPLQDVDAATEELQRCVNDLGFVGALVNGFSQEGDGQTPLYYDLPQYRPFWGEVEKLDVPFYLHPRNPLPQDSRIYDGHPWLLGPTWAFAQETAVHALRLMASGLFDEHPRLNIILGHMGEGLPYMMYRIDHRIAWVKAPPDYPAKRRFMDYFLENFHITTSGNFRTQTLIDAILEIGADRILFSTDWPFENIDHAADWFNATSIAEADRVKIGRTNARRLFKLDGR

SEQ ID NO: 430 - protein, 328 aa, Artificial Sequence
  synthetic construct; Dicamba decarboxylase variant
MAQGKVALEEHFAIPETLQDAAGFVPGDYWKELQHRLLDIQDTRLKLMDKHEIGTMILSLAAPAVQAIPDRVKAIEIARRANDFLAEEVAKRPDRFLAFAALPLQDVDAATEELQRCVNDLGFVGAMVNGFSQEGDGQTPLYYDLPQYRPFWGEVEKLDVPFYLHPRNPLPQDSRIYDGHPWLLGPTWAFAQETAVHALRLMASGLFDEHPRLNIILGHMGEGLPYMMYRIDHRIAWVKAPPDYPAKRRFMDYFLENFHITTSGNFRTQTLIDAILEIGADRILFSTDWPFENIDHAADWFNATSIAEADRVKIGRTNARRLFKLDGR

SEQ ID NO: 431 - protein, 328 aa, Artificial Sequence
  synthetic construct; Dicamba decarboxylase variant
MAQGKVALEEHFAIPETLQDAAGFVPGDYWKELQHRLLDIQDTRLKLMDKHEIETMILSLAAPAVQAIPDRRKAIEIARRANDFLAEEVAKRPDRFLAFAALPLQDVDAATEELQRCVNDLGFVGAMVNGFSQEGDGQTPLYYDLPQYRPFWGEVEKLDVPFYLHPRNPLPQDSRIYDGHPWLLGPTWAFAQETAVHALRLMASGLFDEHPRLNIILGHMGEGLPYMMYRIDHRIAWVKAPPDYPAKRRFMDYFNENFHITTSGNFRTQTLIDAILEIGADRILFSTDWPFENIDHAADWFNATSIAEADRVKIGRTNARRLFKLDGR

SEQ ID NO: 432 - protein, 328 aa, Artificial Sequence
  synthetic construct; Dicamba decarboxylase variant
MAQGKVALEEHFAIPETLNDAAGFVPGDYWKELQHRLLDIQDTRLKLMDKHEIETMILSLAAPAVQAIPDRRKAIEIARRANDFLAEEVAKRPDRFLAFAALPLQDPDAATEELQRCVNDLGFVGAMVNGFSQEGDGQTPLYYDLPQYRPFWGEVEKLDVPFYLHPRNPLPQDSRIYDGHPWLLGPTWAFAQETAVHALRLMASGLFDEHPRLNIILGHMGEGLPYMMYRIDHRIAWVKAPPDYPAKRRFMDYFNENFHITTSGNFRTQTLIDAILEIGADRILFSTDWPFENIDHAADWFNATSIAEADRVKIGRTNARRLFKLDGR

SEQ ID NO: 433 - protein, 328 aa, Artificial Sequence
  synthetic construct; Dicamba decarboxylase variant
MAQGKVALEEHFAIPETLNDAAGFVPGDYWKELQHRLLDIQDTRLKLMDKHEIGTMILSLAAPAVQAIPDRRKAIEIARRANDFLAEEVAKRPDRFLAFAALPLQDVDAATEELQRCVNDLGFVGAMVNGFSQEGDGQTPLYYDLPQYRPFWGEVEKLDVPFYLHPRNPLPQDSRIYDGHPWLLGPTWAFAQETAVHALRLMASGLFDEHPRLNIILGHMGEGLPYMMYRIDHRIAWVKAPPDYPAKRRFMDYFLENFHITTSGNFRTQTLIDAILEIGADRILFSTDWPFENIDHAADWFNATSIAEADRVKIGRTNARRLFKLDGR

SEQ ID NO: 434 - protein, 328 aa, Artificial Sequence
  synthetic construct; Dicamba decarboxylase variant
MAQGKVALEEHFAIPETLQDAAGFVPGDYWKELQHRLLDIQDTRLKLMDKHEIETMILSLAAPAVQAIPDRRKAIEIARRANDFLAEEVAKRPDRFLAFAALPMQDVDAATEELQRCVNDLGFVGALVNGFSQEGDGQTPLYYDLPQYRPFWGEVEKLDVPFYLHPRNPLPQDSRIYDGHPWLLGPTWAFAQETAVHALRLMASGLFDEHPGLNIILGHMGEGLPYMMYRIDHRIAWVKAPPDYPAKRRFMDYFNENFHITTSGNFRTQTLIDAILEIGADRILFSTDWPFENIDHAADWFNATSIAEADRVKIGRTNARRLFKLDLR

SEQ ID NO: 435 - protein, 328 aa, Artificial Sequence
  synthetic construct; Dicamba decarboxylase variant
MAQGKVALEEHFAIPETLNDAAGFVPGDYWKELQHRLLDIQDTRLKLMDKHEIETMILSLAAPAVQAIPDRRKAIEIARRANDFLAEEVAKRPDRFLAFAALPLQDVDAATEELQRCVNDLGFVGALVNGFSVEGDGQTPLYYDLPQYRPFWGEVEKLDVPFYLHPRNPLPQDSRIYDGHPWLLGPTWAFAQETAVHALRLMASGLFDEHPRLNIILGHMGEGLPYMMYRIDHRIAWVKAPPDYPAKRRFMDYFLENFHITTSGNFRTQTLIDAILEIGADRILFSTDWPFENIDHAAAWFNATSIAEADRLKIGRTNARRLFKLDLR

SEQ ID NO: 436 - protein, 328 aa, Artificial Sequence
  synthetic construct; Dicamba decarboxylase variant
MAQGKVALEEHFAIPETLQDAAGFVPGDYWKELQHRLLDIQDTRLKLMDKHEIETMILSLAAPAVQAIPDRRKAIEIARRANDFLAEEVAKRPDRFLAFAALPMQDPDAATEELQRTVRTLGFVGAMVNGFSVEGDGQTPLYYDLPQYRPFWGEVEKLDVPFYLHPRNPLPQDSRIYDGHPWLLGPTWAFAQETAVHALRLMASGLFDEHPGLNIILGHLGEGLPYMMYRIDHRIAWVKAPPDYPAKRRFMDYFLENFHITTSGNFRTQTLIDAILEIGADRILFSTDWPFENIDHAADWFNATSIAEADRVKIGRTNARRLFKLDLR

SEQ ID NO: 437 - protein, 328 aa, Artificial Sequence
  synthetic construct; Dicamba decarboxylase variant
MTQGKVALEEHFAIPETLQDAADFVPGDYWKELQHRLLDIQDQRLRLMDKHEIGTMILSLAAPAVQAIPDRRKAIEIARRANDFLAEEVAKRPDRFLAFAALPMQDPDAATEELQRCVNDLGFVGALVNGFSQEGDGQTPLYYDLPQYRPFWGEVEKLDVPFYLHPRNPLPQDSRIYDGHPWLLGPTWAFAQETAVHALRLMASGLFDEHPGLNIILGHMGEGLPYMMYRIDHRIGWVKAPPDYPAKRRFMDYFLENFHITTSGNFRTQTLIDAILEIGADRILFSTDWPFENIDHAAAWFNATSIAEADRVKIGRTNARRLFKLDGR

SEQ ID NO: 438 - protein, 328 aa, Artificial Sequence
  synthetic construct; Dicamba decarboxylase variant
MAQGKVALEEHFAIPETLQDAAGFVPGDYWKELQHRLLDIQDTRLKLMDKHEIETMILSLAAPAVQAIPDRRKAIEIARRANDFLAEEVAKRPDRFLAFAALPLQDPDAASEELQRTVRTLGFVGAMVNGFSVEGDGQTPLYYDLPQYRPFWGEVEKLDVPFYLHPRNPLPQDSRIYDGHPWLLGPTWAFAQETAVHALRLMASGLFDEHPRLNIILGHMGEGLPYMMYRIDHRIAWVKAPPDYPAKRRFMDYFNENFHITTSGNFRTQTLIDAILEIGADRILFSTDWPFENIDHAAAWFNATSIAEADRVKIGRTNARRLFKLDGR

SEQ ID NO: 439 - protein, 328 aa, Artificial Sequence
  synthetic construct; Dicamba decarboxylase variant
MAQGKVALEEHFAIPETLQDAAGFVPGDYWKELQHRLLDIQDQRLRLMDKHEIETMILSLAAPAVQAIPDRRKAIEIARRANDFLAEEVAKRPDRFLAFAALPLQDPDAATEELQRCVNDLGFVGAMVNGFSVEGDGQTPLYYDLPQYRPFWGEVEKLDVPFYLHPRNPLPQDSRIYDGHPWLLGPTWAFAQETAVHALRLMASGLFDEHPRLNIILGHLGEGLPYMMYRIDHRIAWVKAPPDYPAKRRFMDYFNENFHITTSGNFRTQTLIDAILEIGADRILFSTDWPFENIDHAAAWFNATSIAEADRLKIGRTNARRLFKLDLR

SEQ ID NO: 440 - protein, 328 aa, Artificial Sequence
  synthetic construct; Dicamba decarboxylase variant
MAQGKVALEEHFAIPETLNDAAGFVPGDYWKELQHRLLDIQDTRLKLMDKHEIGTMILSLAAPAVQAIPDRRKAIEIARRANDFLAEEVAKRPDRFLAFAALPMQDVDAATEELQRCVNDLGFVGALVNGFSQEGDGQTPLYYDLPQYRPFWKEVEKLDVPFYLHPRNPLPQDSRIYDGHPWLLGPTWAFAQETAVHALRLMASGLFDEHPRLNIILGHLGEGLPYMMYRIDHRIAWVKAPPDYPAKRRFMDYFNENFHITTSGNFRTQTLIDAILEIGADRILFSTDWPFENIDHAAAWFNATSIAEADRVKIGRTNARRLFKLDGR

SEQ ID NO: 441 - protein, 328 aa, Artificial Sequence
  synthetic construct; Dicamba decarboxylase variant
MAQGKVALEEHFAIPETLNDAAGFVPGDYWKELQHRLLDIQDTRLKLMDKHEIETMILSLAAPAVQAIPDRRKAIEIARRANDFLAEEVAKRPDRFLAFAALPLQDPDAATEELQRCVNDLGFVGAMVNGFSVEGDGQTPLYYDLPQYRPFWGEVEKLDVPFYLHPRNPLPQDSRIYDGHPWLLGPTWAFAQETAVHALRLMASGLFDEHPRLNIILGHMGEGLPYMMYRIDHRIAWVKAPPDYPAKRRFMDYFNENFHITTSGNFRTQTLIDAILEIGADRILFSTDWPFENIDHAAAWFNATSIAEADRVKIGRTNARRLFKLDGR

SEQ ID NO: 442 - protein, 328 aa, Artificial Sequence
  synthetic construct; Dicamba decarboxylase variant
MAQGKVALEEHFAIPETLNDAAGFVPGDYWKELQHRLLDIQDQRLRLMDKHEIETMILSLAAPAVQAIPDRRKAIEIARRANDFLAEEVAKRPDRFLAFAALPLQDPDAASEELQRTVRTLGFVGAMVNGFSQEGDGQTPLYYDLPQYRPFWGEVEKLDVPFYLHPRNPLPQDSRIYDGHPWLLGPTWAFAQETAVHALRLMASGLFDEHPGLNIILGHLGEGLPYMMYRIDHRIAWVKAPPDYPAKRRFMDYFNENFHITTSGNFRTQTLIDAILEIGADRILFSTDWPFENIDHAAAWFNATSIAEADRLKIGRTNARRLFKLDGR

SEQ ID NO: 443 - protein, 328 aa, Artificial Sequence
  synthetic construct; Dicamba decarboxylase variant
MAQGKVALEEHFAIPETLQDAAGFVPGDYWKELQHRLLDIQDTRLKLMDKHEIETMILSLAAPAVQAIPDRRKAIEIARRANDFLAEEVAKRPDRFLAFAALPLQDPDAATEELQRTVRTLGFVGAMVNGFSVEGDGQTPLYYDLPQYRPFWGEVEKLDVPFYLHPRNPLPQDSRIYDGHPWLLGPTWAFAQETAVHALRLMASGLFDEHPRLNIILGHLGEGLPYMMYRIDHRIGWVKAPPDYPAKRRFMDYFLENFHITTSGNFRTQTLIDAILEIGADRILFSTDWPFENIDHAAAWFNATSIAEADRLKIGRTNARRLFKLDGR

SEQ ID NO: 444 - protein, 328 aa, Artificial Sequence
  synthetic construct; Dicamba decarboxylase variant
MAQGKVALEEHFAIPETLQDAAGFVPGDYWKELQHRLLDIQDQRLRLMDKHEIGTMILSLAAPAVQAIPDRRKAIEIARRANDFLAEEVAKRPDRFLAFAALPMQDVDAASEELQRCVNDLGFVGAMVNGFSVEGDGQTPLYYDLPQYRPFWKEVEKLDVPFYLHPRNPLPQDSRIYDGHPWLLGPTWAFAQETAVHALRLMASGLFDEHPGLNIILGHLGEGLPYMMYRIDHRIAWVKAPPDYPAKRRFMDYFNENFHITTSGNFRTQTLIDAILEIGADRILFSTDWPFENIDHAADWFNATSIAEADRVKIGRTNARRLFKLDGR

SEQ ID NO: 445 - protein, 328 aa, Artificial Sequence
  synthetic construct; Dicamba decarboxylase variant
MAQGKVALEEHFAIPETLQDAAGFVPGDYWKELQHRLLDIQDTRLKLMDKHEIETMILSLAAPGVQAIPDRRKAIEIARRANDFLAEEVAKRPDRFLAFAALPLQDPDAATEELQRCVNDLGFVGAMVNGFSVEGDGQTPLYYDLPQYRPFWGEVEKLDVPFYLHPRNPLPQDSRIYDGHPWLLGPTWAFAQETAVHALRLMASGLFDEHPRLNIILGHLGEGLPYMMYRIDHRIGWVKAPPDYPAKRRFMDYFNENFHITTSGNFRTQTLIDAILEIGADRILFSTDWPFENIDHAAAWFNATSIAEADRVKIGRTNARRLFKLDGR

SEQ ID NO: 446 - protein, 328 aa, Artificial Sequence
  synthetic construct; Dicamba decarboxylase variant
MAQGKVALEEHFAIPETLNDAAGFVPGDYWKELQHRLLDIQDTRLKLMDKHEIGTMILSLAAPAVQAIPDRRKAIEIARRANDFLAEEVAKRPDRFLAFAALPLQDPDAATEELQRCVNDLGFVGALVNGFSQEGDGQTPLYYDLPQYRPFWGEVEKLDVPFYLHPRNPLPQDSRIYDGHPWLLGPTWAFAQETAVHALRLMASGLFDEHPRLNIILGHLGEGLPYMMYRIDHRIAWVKAPPDYPAKRRFMDYFNENFHITTSGNFRTQTLIDAILEIGADRILFSTDWPFENIDHAADWFNATSIAEADRVKIGRTNARRLFKLDGR

SEQ ID NO: 447 - protein, 328 aa, Artificial Sequence
  synthetic construct; Dicamba decarboxylase variant
MAQGKVALEEHFAIPETLQDAAGFVPGDYWKELQHRLLDIQDTRLKLMDKHEIETMILSLAAPAVQAIPDLRKAIEIARRANDFLAEEVAKRPDRFLAFAALPLQDPDAATEELQRCVNDLGFVGALVNGFSQEGDGQTPLYYDLPQYRPFWGEVEKLDVPFYLHPRNPLPQDSRIYDGHPWLLGPTWAFAQETAVHALRLMASGLFDEHPRLNIILGHLGEGLPYMMYRIDHRIAWVKAPPDYPAKRRFMDYFLENFHITTSGNFRTQTLIDAILEIGADRILFSTDWPFENIDHAADWFNATSIAEADRVKIGRTNARRLFKLDLR

SEQ ID NO: 448 - protein, 328 aa, Artificial Sequence
  synthetic construct; Dicamba decarboxylase variant
MAQGKVALEEHFAIPETLQDAAGFVPGDYWKELQHRLLDIQDQRLRLMDKHEIGTMILSLAAPAVQAIPDRRKAIEIARRANDFLAEEVAKRPDRFLAFAALPMQDVDAASEELQRCVNDLGFVGAMVNGFSQEGDGQTPLYYDLPQYRPFWGEVEKLDVPFYLHPRNPLPQDSRIYDGHPWLLGPTWAFAQETAVHALRLMASGLFDEHPRLNIILGHMGEGLPYMMYRIDHRIGWVKAPPDYPAKRRFMDYFLENFHITTSGNFRTQTLIDAILEIGADRILFSTDWPFENIDHAAAWFNATSIAEADRVKIGRTNARRLFKLDLR

SEQ ID NO: 449 - protein, 328 aa, Artificial Sequence
  synthetic construct; Dicamba decarboxylase variant
  misc_feature (3)..(3): Xaa can be any naturally occurring amino acid
MGXGKVALEEHFAIPETLQDAAGFVPSDYWKELQHRLLDIQDTRLKLMDKHEIETMILSLAAPAVQAIPDRRKAIEIARRANDFLAEEVAKRPDRFLAFAALPLQDPDAATEELQRCVNDLGFVGALVNGFSVEGDGQTPLYYDLPQYRPFWGEVEKLDVPFYLHPRNPLPQDSRIYDGHPWLLGPTWAFAQETAVHALRLMASGLFDEHPRLNIILGHMGEGLPYMMYRIDHRIGWVKAPPDYPAKRRFMDYFLENFHITTSGNFRTQTLIDAILEIGADRILFSTDWPFENIDHAAAWFNATSIAEADRLKIGRTNARRLFKLDGR

SEQ ID NO: 450 - protein, 328 aa, Artificial Sequence
  synthetic construct; Dicamba decarboxylase variant
MAQGKVALEEHFAIPETLQDAADFVPGDYWKELQHRLLDIQDQRLRLMDKHEIGTMILSLAAPAVQAIPDRRKAIEIARRANDFLAEEVAKRPDRFLAFAALPMQDVDAATEELQRCVNDLGFVGALVNGFSQEGDGQTPLYYDLPQYRPFWGEVEKLDVPFYLHPRNPLPQDSRIYDGHPWLLGPTWAFAQETAVHALRLMASGLFDEHPGLNIILGHLGEGLPYMMYRIDHRIAWVKAPPDYPAKRRFMDYFNENFHITTSGNFRTQTLIDAILEIGADRILFSTDWPFENIDHAADWFNATSIAEADRVKIGRTNARRLFKLDGR

SEQ ID NO: 451 - protein, 328 aa, Artificial Sequence
  synthetic construct; Dicamba decarboxylase variant
MAQGKVALEEHFAIPETLQDAAGFVPGDYWKELQHRLLDIQDTRLKLMDKHEIETMILSLAAPGVQAIPDRRKAIEIARRANDFLAEEVAKRPDRFLAFAALPLQDPDAATEELQRCVNDLGFVGAMVNGFSVEGDGQTPLYYDLPQYRPFWGEVEKLDVPFYLHPRNPLPQDSRIYDGHPWLLGPTWAFAQETAVHALRLMASGLFDEHPGLQIILGHMGEGLPYMMYRIDHRIAWVKAPPDYPAKRRFMDYFLENFHITTSGNFRTQTLIDAILEIGADRILFSTDWPFENIDHAAAWFAETSIAEADRLKIGRTNARRLFKLDGR

SEQ ID NO: 452 - protein, 328 aa, Artificial Sequence
  synthetic construct; Dicamba decarboxylase variant
MAQGKVALEEHFAIPETLQDAAGFVPGDYWKELQHRLLDIQDTRLKLMDKHEIETMILSLAAPAVQAIPDRRKAIEIARRANDFLAEEVAKRPDRFLAFAALPMQDPDAATEELQRCVNDLGFVGAMVNGFSVEGDGQTPLYYDLPQYRPFWGEVEKLDVPFYLHPRNPLPQDSRIYDGHPWLLGPTWAFAQETAVHALRLMASGLFDEHPGLQIILGHMGEGLPYMMYRIDHRIGWVQAPPDYPAKRRFMDYFLENFHITTSGNFRTQTLIDAILEIGADRILFSTDWPFENIDHAADWFNATSIAEADRVKIGRTNARRLFKLDGR

SEQ ID NO: 453 - protein, 328 aa, Artificial Sequence
  synthetic construct; Dicamba decarboxylase variant
MAQGKVALEEHFAIPETLQDAAGFVPGDYWKELQHRLLDIQDTRLKLMDKHEIGTMILSLAAPAVQAIPDRVKAIEIARRANDFLAEEVAKRPDRFLAFAALPLQDPDAATEELQRCVNDLGFVGAMVNGFSQEGDGQTPLYYDLPQYRPFWGEVEKLDVPFYLHPRNPLPQDSRIYDGHPWLLGPTWAFAQETAVHALRLMASGLFDEHPRLNIILGHMGEGLPYMMYRIDHRIAWVKAPPDYPAKRRFMDYFLENFHITTSGNFRTQTLIDAILEIGADRILFSTDWPFENIDHAADWFNATSIAEADRVKIGRTNARRLFKLDGR

SEQ ID NO: 454 - protein, 328 aa, Artificial Sequence
  synthetic construct; Dicamba decarboxylase variant
MAQGKVALEEHFAIPETLQDAAGFVPGDYWKELQHRLLDIQDTRLKLMDKHEIETMILSLAAPAVQAIPDRRKAVEIARRANDFLAEEVAKRPDRFLAFAALPLQDPDAATEELQRCVNDLGFVGAMVNGFSQEGDGQTPLYYDLPQYRPFWGEVEKLDVPFYLHPRNPLPQDSRIYDGHPWLLGPTWAFAQETAVHALRLMASGLFDEHPRLNIILGHMGEGLPYMMYRIDHRIAWVKAPPDYPAKRRFMDYFLENFHITTSGNFRTQTLIDAILEIGADRILFSTDWPFENIDHAADWFNATSIAEADRVKIGRTNARRLFKLDGR

SEQ ID NO: 455 - protein, 328 aa, Artificial Sequence
  synthetic construct; Dicamba decarboxylase variant
MAQGKVALEEHFAIPETLNDAAGFVPGDYWKELQHRLLDIQDTRLKLMDKHEIETMILSLAAPAVQAIPDRRKAIEIARRANDFLAEEVAKRPDRFLAFAALPLQDPDAATEELQRCVNDLGFVGAMVNGFSQEGDGQTPLYYDLPQYRPFWGEVEKLDVPFYLHPRNPLPQDSRIYDGHPWLLGPTWAFAQETAVHALRLMASGLFDEHPRLNIILGHMGEGLPYMMYRIDHRIAWVKAPPDYPAKRRFMDYFLENFHITTSGNFRTQTLIDAILEIGADRILFSTDWPFENIDHAADWFNATSIAEADRVKIGRTNARRLFKLDGR

SEQ ID NO: 456 - protein, 328 aa, Artificial Sequence
  synthetic construct; Dicamba decarboxylase variant
MAQGKVALEEHFAIPETLQDAAGFVPGDYWKELQHRLLDIQDTRLKLMDKHEIGTMILSLAAPAVQAIPDRRKAIEIARRANDFLAEEVAKRPDRFLAFAALPLQDPDAATEELQRCVNDLGFVGAMVNGFSQEGDGQTPLYYDLPQYRPFWGEVEKLDVPFYLHPRNPLPQDSRIYDGHPWLLGPTWAFAQETAVHALRLMASGLFDEHPRLNIILGHMGEGLPYMMYRIDHRIAWVKAPPDYPAKRRFMDYFLENFHITTSGNFRTQTLIDAILEIGADRILFSTDWPFENIDHAADWFNATSIAEADRVKIGRTNARRLFKLDGR

SEQ ID NO: 457 - protein, 328 aa, Artificial Sequence
  synthetic construct; Dicamba decarboxylase variant
MAQGKVALEEHFAIPETLQDAAGFVPGDYWKELQHRLLDIQDTRLKLMDKHEIETMILSLAAPAVQAIPDRRKAIEIARRANDFLAEEVAKRPDRFLAFAALPMQDPDAATEELQRCVNDLGFVGAMVNGFSQEGDGQTPLYYDLPQYRPFWGEVEKLDVPFYLHPRNPLPQDSRIYDGHPWLLGPTWAFAQETAVHALRLMASGLFDEHPGLNIILGHLGEGLPYMMYRIDHRIAWVKAPPDYPAKRRFMDYFNENFHITTSGNFRTQTLIDAILEIGADRILFSTDWPFENIDHAAAWFNATSIAEADRLKIGRTNARRLFKLDGR

SEQ ID NO: 458 - protein, 328 aa, Artificial Sequence
  synthetic construct; Dicamba decarboxylase variant
MAQGKVALEEHFAIPATLNDAAGFVPGDYWKELQHRLLDIQDTRLKLMDKHEIETMILSLAAPAVQAIPDRRKAIEIARRANDFLAEEVAKRPDRFLAFAALPLQDPDAATEELQRCVNDLGFVGAMVNGFSVEGDGQTPLYYDLPQYRPFWGEVEKLDVPFYLHPRNPLPQDSRIYDGHPWLLGPTWAFAQETAVHALRLMASGLFDEHPGLQIILGHLGEGLPYMMYRIDHRIGWVQAPPDYPAKRRFMDYFLENFHITTSGNFRTQTLIDAILEIGADRILFSTDWPFENIDHAAAWFAETSIAEADRVKIGRTNARRLFKLDGR

SEQ ID NO: 459 - protein, 328 aa, Artificial Sequence
  synthetic construct; Dicamba decarboxylase variant
MAQGKVALEEHFAIPETLQDAAGFVPGDYWKELQHRLLDIQDTRLKLMDKHEIETMILSLAAPAVQAIPDRRKAIEIARRANDFLAEEVAKRPDRFLAFAALPLQDPDAATEELQRCVNDLGFVGALVNGFSQEGDGQTPLYYDLPQYRPFWGEVEKLDVPFYLHPRNPLPQDSRIYDGHPWLLGPTWAFAQETAVHALRLMASGLFDEHPRLNIILGHMGEGLPYMMYRIDHRIGWVQAPPDYPAKRRFMDYFLENFHITTSGNFRTQTLIDAILEIGADRILFSTDWPFENIDHAAAWFAETSIAEADRLKIGRTNARRLFKLDGR

SEQ ID NO: 460 - protein, 328 aa, Artificial Sequence
  synthetic construct; Dicamba decarboxylase variant
MAQGKVALEEHFAIPETLQDAAGFVPGDYWKELQHRLLDIQDTRLKLMDKHEIETMILSLAAPAVQAIPDRVKAIEIARRANDFLAEEVAKRPDRFLAFAALPLQDVDAATEELQRCVNDLGFVGAMVNGFSQEGDGQTPLYYDLPQYRPFWGEVEKLDVPFYLHPRNPLPQDSRIYDGHPWLLGPTWAFAQETAVHALRLMASGLFDEHPRLNIILGHMGEGLPYMMYRIDHRIAWVKAPPDYPAKRRFMDYFNENFHITTSGNFRTQTLIDAILEIGADRILFSTDWPFENIDHAADWFNAASIAEADRVKIGRTNARRLFKLDGR

SEQ ID NO: 461 - protein, 328 aa, Artificial Sequence
  synthetic construct; Dicamba decarboxylase variant
MAQGKVALEEHFAIPETLQDAAGFVPGDYWKELQHRLLDIQDTRLKLMDKHEIETMILSLAAPAVQAIPDRVKAIEIARRANDFLAEEVAKRPDRFLAFAALPLQDPDAATEELQRCVNDLGFVGAMVNGFSQEGDGQTPLYYDLPQYRPFWGEVEKLDVPFYLHPRNPLPQDSRIYDGHPWLLGPTWAFAQETAVHALRLMASGLFDEHPRLNIILGHMGEGLPYMMYRIDHRIAWVKAPPDYPAKRRFMDYFLENFHITTSGNFRTQTLIDAILEIGADRILFSTDWPFENIDHAADWFNATSIAEADRVKIGRTNARRLFKLGGR

SEQ ID NO: 462 - protein, 328 aa, Artificial Sequence
  synthetic construct; Dicamba decarboxylase variant
MAQGKVALEEHFAIPETLQDAADFVPGDYWKELQHRLLDIQDTRLKLMDKHEIETMILSLAAPAVQAIPDRRKAIEIARRANDFLAEEVAKRPDRFLAFAALPLQDVDAATEELQRCVNDLGFVGAMVNGFSQEGDGQTPLYYDLPQYRPFWGEVEKLDVPFYLHPRNPLPQDSRIYDGHPWLLGPTWAFAQETAVHALRLMASGLFDEHPRLNIILGHMGEGLPYMMYRIDHRIAWVKAPPDYPAKRRFMDYFNENFHITTSGNFRTQTLIDAILEIGADRILFSTDWPFENIDHAADWFNATSIAEADRVKIGRTNARRLFKLDGR

SEQ ID NO: 463 - protein, 328 aa, Artificial Sequence
  synthetic construct; Dicamba decarboxylase variant
MAQGKVALEEHFAIPETLQDAAGFVPGDYWKELQHRLLDIQDTRLKLMDKHEIETMILSLAAPAVQAIPDRRKAIEIARRANDFLAEEVAKRPDRFLAFAALPLQDVDAATEELQRCVNDLGFVGAMVNGFSQEGDGQTPLYYDLPQYRPFWGEVEKLDVPFYLHPRNPLPQDSRIYDGHPWLLGPTWAFAQETAVHALRLMASGLFDEHPRLNIILGHMGEGLPYMMYRIDHRIAWVKAPPDYPAKRRFMDYFLENFHITTSGNFRTQTLIDAILEIGADRILFSTDWPFENIDHAADWFNATSIAEADRVKIGRTNARRLFKLDGR

SEQ ID NO: 464 - protein, 328 aa, Artificial Sequence
  synthetic construct; Dicamba decarboxylase variant
MAQGKVALEEHFAIPETLNDAAGFVPSDYWKELQHRLLDIQDTRLKLMDKHEIETMILSLAAPAVQAIPDRVKAIEIARRANDFLAEEVAKRPDRFLAFAALPLQDPDAATEELQRCVNDLGFVGALVNGFSQEGDGQTPLYYDLPQYRPFWGEVEKLDVPFYLHPRNPLPQDSRIYDGHPWLLGPTWAFAQETAVHALRLMASGLFDEHPRLNIILGHMGEGLPYMMYRIDHRIAWVKAPPDYPAKRRFMDYFLENFHITTSGNFRTQTLIDAILEIGADRILFSTDWPFENIDHAADWFNATSIAEADRVKIGRTNARRLFKLDGR

SEQ ID NO: 465 - protein, 328 aa, Artificial Sequence
  synthetic construct; Dicamba decarboxylase variant
MAQGKVALEEHFAIPETLNDAADFVPGDYWKELQHRLLDIQDTRLKLMDKHEIETMILSLAAPAVQAIPDRRKAIEIARRANDFLAEEVAKRPDRFLAFAALPLQDPDAATEELQRCVNDLGFVGAMVNGFSQEGDGQTPLYYDLPQYRPFWGEVEKLDVPFYLHPRNPLPQDSRIYDGHPWLLGPTWAFAQETAVHALRLMASGLFDEHPRLNIILGHMGEGLPYMMYRIDHRIAWVKAPPDYPAKRRFMDYFNENFHITTSGNFRTQTLIDAILEIGADRILFSTDWPFENIDHAADWFNATSIAEADRVKIGRTNARRLFKLDGR

SEQ ID NO: 466 - protein, 328 aa, Artificial Sequence
  synthetic construct; Dicamba decarboxylase variant
MAQGKVALEEHFAIPETLNDAAGFVPGDYWKELQHRLLDIQDTRLKLMDKHEIETMILSLAAPAVQAIPDRVKAIEIARRANDFLAEEVAKRPDRFLAFAALPLQDPDAATEELQRCVNDLGFVGAMVNGFSQEGDGQTPLYYDLPQYRPFWGEVEKLDVPFYLHPRNPLPQDSRIYDGHPWLLGPTWAFAQETAVHALRLMASGLFDEHPRLNIILGHMGEGLPYMMYRIDHRIAWVKAPPDYPAKRRFMDYFNENFHITTSGNFRTQTLIDAILEIGADRILFSTDWPFENIDHAADWFNATSIAEADRVKIGRTNARRLFKLDGR

SEQ ID NO: 467 - protein, 328 aa, Artificial Sequence
  synthetic construct; Dicamba decarboxylase variant
MAQGKVALEEHFAIPETLDDAAGFVPGDYWKELQHRLLDIQDTRLKLMDKHEIETMILSLAAPAVQAIPDRVKAIEIARRANDFLAEEVAKRPDRFLAFAALPLQDPDAATEELQRCVNDLGFVGAMVNGFSQEGDGQTPLYYDLPQYRPFWGEVEKLDVPFYLHPRNPLPQDSRIYDGHPWLLGPTWAFAQETAVHALRLMASGLFDEHPRLNIILGHMGEGLPYMMYRIDHRIAWVKAPPDYPAKRRFMDYFNENFHITTSGNFRTQTLIDAILEIGADRILFSTDWPFENIDHAADWFNATSIAEADRVKIGRTNARRLFKLDGR

SEQ ID NO: 468 - protein, 328 aa, Artificial Sequence
  synthetic construct; Dicamba decarboxylase variant
MAQGKVALEEHFAIPETLNDAAGFVPGDYWKELQHRLLDIQDTRLKLMDKHEIETMILSLAAPAVQAIPDRVKAIEIARRANDFLAEEVAKRPDRFLAFAALPLQDVDAATEELQRCVNDLGFVGAMVNGFSQEGDGQTPLYYDLPQYRPFWGEVEKLDVPFYLHPRNPLPQDSRIYDGHPWLLGPTWAFAQETAVHALRLMASGLFDEHPRLNIILGHMGEGLPYMMYRIDHRIAWVKAPPDYPAKRRFMDYFLENFHITTSGNFRTQTLIDAILEIGADRILFSTDWPFENIDHAADWFNATSIAEADRVKIGRTNARRLFKLDGR

SEQ ID NO: 469 - protein, 328 aa, Artificial Sequence
  synthetic construct; Dicamba decarboxylase variant
MAQGKVALEEHFAIPETLQDAAGFVPGDYWKELQHRLLDIQDTRLKLMDKHEIGTMILSLAAPAVQAIPDRRKAIEIARRANDFLAEEVAKRPDRFLAFAALPLQDPDAATEELQRCVNDLGFVGAMVNGFSQEGDGQTPLYYDLPQYRPFWGEVEKLDVPFYLHPRNPLPQDSRIYDGHPWLLGPTWAFAQETAVHALRLMASGLFDEHPRLNIILGHMGEGLPYMMYRIDHRIAWVKAPPDYPAKRRFMDYFNENFHITTSGNFRTQTLIDAILEIGADRILFSTDWPFENIDHAADWFNATSIAEADRVKIGRTNARRLFKLDGR

SEQ ID NO: 470 - protein, 328 aa, Artificial Sequence
  synthetic construct; Dicamba decarboxylase variant
MAQGKVALEEHFAIPETLQDAAGFVPGDYWKELQHRLLDIQDTRLKLMDKHEIETMILSLAAPAVQAIPDRRKAIEIARRANDFLAEEVAKRPDRFLAFAALPMQDVDAATEELQRCVRDLGFVGAMVNGFSQEGDGQTPLYYDLPQYRPFWGEVEKLDVPFYLHPRNPLPQDSRIYDGHPWLLGPTWAFAQETAVHALRLMASGLFDEHPRLNIILGHLGEGLPYMMYRIDHRIAWVKAPPDYPAKRRFMDYFLENFHITTSGNFRTQTLIDAILEIGADRILFSTDWPFENIDHAADWFNATSIAEADRVKIGRTNARRLFKLDGR

SEQ ID NO: 471 - protein, 328 aa, Artificial Sequence
  synthetic construct; Dicamba decarboxylase variant
MAQGKVALEEHFAIPETLQDAADFVPGDYWKELQHRLLDIQDTRLKLMDKHEIETMILSLAAPAVQAIPDRRKAIEIARRANDFLAEEVAKRPDRFLAFAALPLQDPDAATEELQRCVRDLGFVGAMVNGFSQEGDGQTPLYYDLPQYRPFWGEVEKLDVPFYLHPRNPLPQDSRIYDGHPWLLGPTWAFAQETAVHALRLMASGLFDEHPRLNIILGHLGEGLPYMMYRIDHRIAWVKAPPDYPAKRRFMDYFLENFHITTSGNFRTQTLIDAILEIGADRILFSTDWPFENIDHAADWFNATSIAEADRVKIGRTNARRLFKLDGR

SEQ ID NO: 472 - protein, 328 aa, Artificial Sequence
  synthetic construct; Dicamba decarboxylase variant
MAQGKVALEEHFAIPETLNDAAGFVPGDYWKELQHRLLDIQDQRLRLMDKHEIGTMILSLAAPAVQAIPDRRKAIEIARRANDFLAEEVAKRPDRFLAFAALPLQDPDAATEELQRCVNDLGFVGAMVNGFSQEGDGQTPLYYDLPQYRPFWKEVEKLDVPFYLHPRNPLPQDSRIYDGHPWLLGPTWAFAQETAVHALRLMASGLFDEHPGLNIILGHMGEGLPYMMYRIDHRIAWVKAPPDYPAKRRFMDYFLENFHITTSGNFRTQTLIDAILEIGADRILFSTDWPFENIDHAAAWFNATSIAEADRVKIGRTNARRLFKLDGR

SEQ ID NO: 473 - protein, 328 aa, Artificial Sequence
  synthetic construct; Dicamba decarboxylase variant
MAQGKVALEEHFAIPETLQDAAGFVPGDYWKELQHRLLDIQDTRLKLMDKHEIETMILSLAAPAVQAIPDRRKAIEIARRANDFLAEEVAKRPDRFLAFAALPLQDPDAATEELQRCVRDLGFVGAMVNGFSQEGDGQTPLYYDLPQYRPFWGEVEKLDVPFYLHPRNPLPQDSRIYDGHPWLLGPTWAFAQETAVHALRLMASGLFDEHPGLNIILGHLGEGLPYMMYRIDHRIAWVKAPPDYPAKRRFMDYFLENFHITTSGNFRTQTLIDAILEIGADRILFSTDWPFENIDHAAAWFNATSIAEADRVKIGRTNARRLFKLDGR

SEQ ID NO: 474 - protein, 328 aa, Artificial Sequence
  synthetic construct; Dicamba decarboxylase variant
MAQGKVALEEHFAIPETLQDAAGFVPGDYWKELQHRLLDIQDTRLKLMDKHEIETMILSLAAPAVQAIPDRRKAIEIARRANDFLAEEVAKRPDRFLAFAALPLQDPDAATEELQRCVNDLGFVGAMVNGFSQEGDGQTPLYYDLPQYRPFWGEVEKLDVPFYLHPRNPLPQDSRIYDGHPWLLGPTWAFAQETAVHALRLMASGLFDEHPRLNIILGHLGEGLPYMMYRIDHRIAWVKAPPDYPAKRRFMDYFNENFHITTSGNFRTQTLIDAILEIGADRILFSTDWPFENIDHAADWFNATSIAEADRVKIGRTNARRLFKLDGR

SEQ ID NO: 475 - protein, 328 aa, Artificial Sequence
  synthetic construct; Dicamba decarboxylase variant
MAQGKVALEEHFAIPETLNDAADFVPGDYWKELQHRLLDIQDTRLKLMDKHEIETMILSLAAPAVQAIPDRRKAIEIARRANDFLAEEVAKRPDRFLAFAALPMQDPDAATEELQRCVNDLGFVGAMVNGFSVEGDGQTPLYYDLPQYRPFWKEVEKLDVPFYLHPRNPLPQDSRIYDGHPWLLGPTWAFAQETAVHALRLMASGLFDEHPGLNIILGHMGEGLPYMMYRIDHRIAWVKAPPDYPAKRRFMDYFLENFHITTSGNFRTQTLIDAILEIGADRILFSTDWPFENIDHAAAWFNATSIAEADRLKIGRTNARRLFKLDGR

SEQ ID NO: 476 - protein, 328 aa, Artificial Sequence
  synthetic construct; Dicamba decarboxylase variant
MAQGKVALEEHFAIPETLQDAAGFVPGDYWKELQHRLLDIQDTRLKLMDKHEIETMILSLAAPAVQAIPDRRKAIEIARRANDFLAEEVAKRPDRFLAFAALPLQDPDAATEELQRCVNDLGFVGAMVNGFSVEGDGQTPLYYDLPQYRPFWKEVEKLDVPFYLHPRNPLPQDSRIYDGHPWLLGPTWAFAQETAVHALRLMASGLFDEHPGLNIILGHMGEGLPYMMYRIDHRIAWVKAPPDYPAKRRFMDYFNENFHITTSGNFRTQTLIDAILEIGADRILFSTDWPFENIDHAAAWFNATSIAEADRVKIGRTNARRLFKLDGR

SEQ ID NO: 477 - protein, 328 aa, Artificial Sequence
  synthetic construct; Dicamba decarboxylase variant
MAQGKVALEEHFAIPETLNDAADFVPSEYWKELQHRLLDIQDTRLKLMDKHEIETMILSLAAPAVQAIPDRVKAIEIARRANDFLAEEVAKRPDRFLAFAALPLQDVDAATEELQRCVNDLGFVGAMVNGFSQEGDGQTPLYYDLPQYRPFWGEVEKLDVPFYLHPRNPLPQDSRIYDGHPWLLGPTWAFAQETAVHALRLMASGLFDEHPRLNIILGHMGEGLPYMMYRIDHRIAWVKAPPDYPAKRRFMDYFLENFHITTSGNFRTQTLIDAILEIGADRILFSTDWPFENIDHAADWFNATSIAEADRVKIGRTNARRLFKLDGR

SEQ ID NO: 478 - protein, 328 aa, Artificial Sequence
  synthetic construct; Dicamba decarboxylase variant
MAQGKVALEEHFAIPETLNDAADFVPSEYWKELQHRLLDIQDTRLKLMDKHEIGTMILSLAAPAVQAIPDRVKAIEIARRANDFLAEEVAKRPDRFLAFAALPLQDVDAATEELQRCVNDLGFVGAMVNGFSQEGDGQTPLYYDLPQYRPFWGEVEKLDVPFYLHPRNPLPQDSRIYDGHPWLLGPTWAFAQETAVHALRLMASGLFDEHPRLNIILGHMGEGLPYMMYRIDHRIAWVKAPPDYPAKRRFMDYFLENFHITTSGNFRTQTLIDAILEIGADRILFSTDWPFENIDHAADWFNATSIAEADRVKIGRTNARRLFKLDGR

SEQ ID NO: 479 - protein, 328 aa, Artificial Sequence
  synthetic construct; Dicamba decarboxylase variant
MAQGKVALEEHFAIPETLQDAADFVPSEYWKELQHRLLDIQDTRLKLMDKHEIGTMILSLAAPAVQAIPDRVKAIEIARRANDFLAEEVAKRPDRFLAFAALPLQDVDAATEELQRCVNDLGFVGAMVNGFSQEGDGQTPLYYDLPQYRPFWGEVEKLDVPFYLHPRNPLPQDSRIYDGHPWLLGPTWAFAQETAVHALRLMASGLFDEHPRLNIILGHMGEGLPYMMYRIDHRIAWVKAPPDYPAKRRFMDYFLENFHITTSGNFRTQTLIDAILEIGADRILFSTDWPFENIDHAADWFNATSIAEADRVKIGRTNARRLFKLDGR

SEQ ID NO: 480 - protein, 328 aa, Artificial Sequence
  synthetic construct; Dicamba decarboxylase variant
MAQGKVALEEHFAIPETLNDAAGFVPSEYWKELQHRLLDIQDQRLRLMDKHEIETMILSLAAPAVQSIPDRVKAIEIARRANDFLAEEVAKRPDRFLAFAALPLQDVDAATEELQRCVNDLGFVGAMVNGFSQEGDGQTPLYYDLPQYRPFWGEVEKLDVPFYLHPRNPLPQDSRIYDGHPWLLGPTWAFAQETAVHALRLMASGLFDEHPGLNIILGHLGEGLPYMMYRIDHRIAWVKAPPDYPAKRRFMDYFLENFHITTSGNFRTQTLIDAILEIGADRILFSTDWPFENIDHAAAWFNATSIAEADRVKIGRTNARRLFKLDGR

SEQ ID NO: 481 - protein, 328 aa, Artificial Sequence
  synthetic construct; Dicamba decarboxylase variant
MAQGKVALEEHFAIPETLNDAADFVPSEYWKELQHRLLDIQDQRLRLMDKHEIGTMILSLAAPAVQSIPDRVKAIEIARRANDFLAEEVAKRPDRFLAFAALPLQDVDAATEELQRCVRDLGFVGAMVNGFSQEGDGQTPLYYDLPQYRPFWGEVEKLDVPFYLHPRNPLPQDSRIYDGHPWLLGPTWAFAQETAVHALRLMASGLFDEHPGLNIILGHLGEGLPYMMYRIDHRIAWVKAPPDYPAKRRFMDYFLENFHITTSGNFRTQTLIDAILEIGADRILFSTDWPFENIDHAADWFNATSIAEADRVKIGRTNARRLFKLDGR

SEQ ID NO: 482 - protein, 328 aa, Artificial Sequence
  synthetic construct; Dicamba decarboxylase variant
MAQGKVALEEHFAIPETLNDAADFVPSEYWKELQHRLLDIQDQRLRLMDKHEIETMILSLAAPAVQAIGDRVKAIEIARRANDFLAEEVAKRPDRFLAFAALPMQDVDAATEELQRCVRDLGFVGAMVNGFSQEGDGQTPLYYDLPQYRPFWGEVEKLDVPFYLHPRNPLPQDSRIYDGHPWLLGPTWAFAQETAVHALRLMASGLFDEHPGLNIILGHMGEGLPYMMYRIDHRIAWVKAPPDYPAKRRFMDYFLENFHITTSGNFRTQTLIDAILEIGADRILFSTDWPFENIDHAAAWFNATSIAEADRVKIGRTNARRLFKLDGR

SEQ ID NO: 483 - protein, 328 aa, Artificial Sequence
  synthetic construct; Dicamba decarboxylase variant
MAQGKVALEEHFAIPETLNDAAGFVPSEYWKELQHRLLDIQDQRLKLMDKHEIGTMILSLAAPAVQAIGDRVKAIEIARRANDFLAEEVAKRPDRFLAFAALPMQDVDAATEELQRCVRDLGFVGAMVNGFSQEGDGQTPLYYDLPQYRPFWKEVEKLDVPFYLHPRNPLPQDSRIYDGHPWLLGPTWAFAQETAVHALRLMASGLFDEHPRLNIILGHMGEGLPYMMYRIDHRIAWVKAPPDYPAKRRFMDYFLENFHITTSGNFRTQTLIDAILEIGADRILFSTDWPFENIDHAADWFNATSIAEADRVKIGRTNARRLFKLDGR

SEQ ID NO: 484 - protein, 328 aa, Artificial Sequence
  synthetic construct; Dicamba decarboxylase variant
MAQGKVALEEHFAIPETLNDAADFVPSEYWKELQHRLLDIQDQRLRLMDKHEIETMILSLAAPAVQAIGDRVKAIEIARRANDFLAEEVAKRPDRFLAFAALPLQDVDAATEELQRCVNDLGFVGAMVNGFSQEGDGQTPLYYDLPQYRPFWKEVEKLDVPFYLHPRNPLPQDSRIYDGHPWLLGPTWAFAQETAVHALRLMASGLFDEHPGLNIILGHLGEGLPYMMYRIDHRIAWVKAPPDYPAKRRFMDYFLENFHITTSGNFRTQTLIDAILEIGADRILFSTDWPFENIDHAAAWFNATSIAEADRVKIGRTNARRLFKLDGR

SEQ ID NO: 485 - protein, 328 aa, Artificial Sequence
  synthetic construct; Dicamba decarboxylase variant
MAQGKVALEEHFAIPETLNDAADFVPSEYWKELQHRLLDIQDTRLRLMDKHEIETMILSLAAPAVQSIPDRVKAIEIARRANDFLAEEVAKRPDRFLAFAALPLQDVDAATEELQRCVRDLGFVGAMVNGFSQEGDGQTPLYYDLPQYRPFWKEVEKLDVPFYLHPRNPLPQDSRIYDGHPWLLGPTWAFAQETAVHALRLMASGLFDEHPGLNIILGHLGEGLPYMMYRIDHRIAWVKAPPDYPAKRRFMDYFLENFHITTSGNFRTQTLIDAILEIGADRILFSTDWPFENIDHAADWFNATSIAEADRVKIGRTNARRLFKLDGR

SEQ ID NO: 486 - protein, 328 aa, Artificial Sequence
  synthetic construct; Dicamba decarboxylase variant
MAQGKVALEEHFAIPETLNDAADFVPSEYWKELQHRLLDIQDQRLKLMDKHEIETMILSLAAPAVQAIGDRVKAIEIARRANDFLAEEVAKRPDRFLAFAALPMQDVDAATEELQRCVRDLGFVGAMVNGFSQEGDGQTPLYYDLPQYRPFWKEVEKLDVPFYLHPRNPLPQDSRIYDGHPWLLGPTWAFAQETAVHALRLMASGLFDEHPRLNIILGHMGEGLPYMMYRIDHRIAWVKAPPDYPAKRRFMDYFLENFHITTSGNFRTQTLIDAILEIGADRILFSTDWPFENIDHAAAWFNATSIAEADRVKIGRTNARRLFKLDGR

SEQ ID NO: 487 - protein, 328 aa, Artificial Sequence
  synthetic construct; Dicamba decarboxylase variant
MAQGKVALEEHFAIPETLNDAADFVPSEYWKELQHRLLDIQDQRLRLMDKHEIETMILSLAAPAVQAIGDRVKAIEIARRANDFLAEEVAKRPDRFLAFAALPMQDVDAATEELQRCVRDLGFVGAMVNGFSQEGDGQTPLYYDLPQYRPFWGEVEKLDVPFYLHPRNPLPQDSRIYDGHPWLLGPTWAFAQETAVHALRLMASGLFDEHPGLNIILGHLGEGLPYMMYRIDHRIAWVKAPPDYPAKRRFMDYFLENFHITTSGNFRTQTLIDAILEIGADRILFSTDWPFENIDHAADWFNATSIAEADRVKIGRTNARRLFKLDGR

SEQ ID NO: 488 - protein, 328 aa, Artificial Sequence
  synthetic construct; Dicamba decarboxylase variant
MAQGKVALEEHFAIPETLNDAAGFVPSEYWKELQHRLLDIQDQRLRLMDKHEIGTMILSLAAPAVQSIGDRVKAIEIARRANDFLAEEVAKRPDRFLAFAALPLQDVDAATEELQRCVNDLGFVGAMVNGFSQEGDGQTPLYYDLPQYRPFWGEVEKLDVPFYLHPRNPLPQDSRIYDGHPWLLGPTWAFAQETAVHALRLMASGLFDEHPGLNIILGHLGEGLPYMMYRIDHRIAWVKAPPDYPAKRRFMDYFLENFHITTSGNFRTQTLIDAILEIGADRILFSTDWPFENIDHAADWFNATSIAEADRVKIGRTNARRLFKLDGR

SEQ ID NO: 489 - protein, 328 aa, Artificial Sequence
  synthetic construct; Dicamba decarboxylase variant
MAQGKVALEEHFAIPETLNDAADFVPSEYWKELQHRLLDIQDQRLRLMDKHEIETMILSLAAPAVQSIPDRVKAIEIARRANDFLAEEVAKRPDRFLAFAALPMQDVDAATEELQRCVNDLGFVGAMVNGFSQEGDGQTPLYYDLPQYRPFWGEVEKLDVPFYLHPRNPLPQDSRIYDGHPWLLGPTWAFAQETAVHALRLMASGLFDEHPRLNIILGHLGEGLPYMMYRIDHRIAWVKAPPDYPAKRRFMDYFLENFHITTSGNFRTQTLIDAILEIGADRILFSTDWPFENIDHAADWFNATSIAEADRVKIGRTNARRLFKLDGR

SEQ ID NO: 490 - protein, 328 aa, Artificial Sequence
  synthetic construct; Dicamba decarboxylase variant
MAQGKVALEEHFAIPETLNDAAGFVPSEYWKELQHRLLDIQDTRLKLMDKHEIGTMILSLAAPAVQAIPDRVKAIEIARRANDFLAEEVAKRPDRFLAFAALPLQDPDAATEELQRCVNDLGFVGAMVNGFSQEGDGQTPLYYDLPQYRPFWGEVEKLDVPFYLHPRNPLPQDSRIYDGHPWLLGPTWAFAQETAVHALRLMASGLFDEHPRLNIILGHMGEGLPYMMYRIDHRIAWVKAPPDYPAKRRFMDYFLENFHITTSGNFRTQTLIDAILEIGADRILFSTDWPFENIDHAADWFNATSIAEADRVKIGRTNARRLFKLDGR

SEQ ID NO: 491 - protein, 328 aa, Artificial Sequence
  synthetic construct; Dicamba decarboxylase variant
MAQGKVALEEHFAIPETLNDAAGFVPSEYWKELQHRLLDIQDTRLKLMDKHEIETMILSLAAPAVQAIPDRRKAIEIARRANDFLAEEVAKRPDRFLAFAALPLQDPDAATEELQRCVNDLGFVGAMVNGFSQEGDGQTPLYYDLPQYRPFWGEVEKLDVPFYLHPRNPLPQDSRIYDGHPWLLGPTWAFAQETAVHALRLMASGLFDVHPRLNIILGHMGEGLPYMMYRIDHRIAWVKAPPDYPAKRRFMDYFLENFHITTSGNFRTQTLIDAILEIGADRILFSTDWPFENIDHAADWFNATSIAEADRVKIGRTNARRLFKLDGR

SEQ ID NO: 492 - protein, 328 aa, Artificial Sequence
  synthetic construct; Dicamba decarboxylase variant
MAQGKVALEEHFAIPETLQDAADFVPSEYWKELQHRLLDIQDTRLKLMDKHEIETMILSLAAPAVQAIPDRVKAIEIARRANDFLAEEVAKRPDRFLAFAALPLQDVDAATEELQRCVNDLGFVGAMVNGFSQEGDGQTPLYYDLPQYRPFWGEVEKLDVPFYLHPRNPLPQDSRIYDGHPWLLGPTWAFAQETAVHALRLMASGLFDEHPRLNIILGHMGEGLPYMMYRIDHRIAWVKAPPDYPAKRRFMDYFLENFHITTSGNFRTQTLIDAILEIGADRILFSTDWPFENIDHAADWFNATSIAEADRVKIGRTNARRLFKLDGR

SEQ ID NO: 493 - protein, 328 aa, Artificial Sequence
  synthetic construct; Dicamba decarboxylase variant
MAQGKVALEEHFAIPETLNDAAGFVPSEYWKELQHRLLDIQDTRLKLMDKHEIGTMILSLAAPAVQAIPDRVKAIEIARRANDFLAEEVAKRPDRFLAFAALPLQDVDAATEELQRCVNDLGFVGAMVNGFSQEGDGQTPLYYDLPQYRPFWGEVEKLDVPFYLHPRNPLPQDSRIYDGHPWLLGPTWAFAQETAVHALRLMASGLFDEHPRLNIILGHMGEGLPYMMYRIDHRIAWVKAPPDYPAKRRFMDYFLENFHITTSGNFRTQTLIDAILEIGADRILFSTDWPFENIDHAADWFNATSIAEADRVKIGRTNARRLFKLDGR

SEQ ID NO: 494 - protein, 328 aa, Artificial Sequence
  synthetic construct; Dicamba decarboxylase variant
MAQGKVALEEHFAIPETLNDAAGFVPSEYWKELQHRLLDIQDTRLKLMDKHEIETMILSLAAPAVQAIPDRVKAIEIARRANDFLAEEVAKRPDRFLAFAALPLQDVDAATEELQRCVNDLGFVGAMVNGFSQEGDGQTPLYYDLPQYRPFWGEVEKLDVPFYLHPRNPLPQDSRIYDGHPWLLGPTWAFAQETAVHALRLMASGLFDEHPRLNIILGHMGEGLPYMMYRIDHRIAWVKAPPDYPAKRRFMDYFLENFHITTSGNFRTQTLIDAILEIGADRILFSTDWPFENIDHAADWFNATSIAEADRVKIGRTNARRLFKLDGR

SEQ ID NO: 495 - protein, 328 aa, Artificial Sequence
  synthetic construct; Dicamba decarboxylase variant
MAQGKVALEEHFAIPETLNDAAGFVPSEYWKELQHRLLDIQDTRLKLMDKHEIETMILSLAAPAVQAIPDRRKAIEIARRANDFLAEEVAKRPDRFLAFAALPLQDVDAATEELQRCVNDLGFVGAMVNGFSQEGDGQTPLYYDLPQYRPFWGEVEKLDVPFYLHPRNPLPQDSRIYDGHPWLLGPTWAFAQETAVHALRLMASGLFDEHPRLNIILGHMGEGLPYMMYRIDHRIAWVKAPPDYPAKRRFMDYFLENFHITTSGNFRTQTLIDAILEIGADRILFSTDWPFENIDHAADWFNATSIAEADRVKIGRTNARRLFKLDGR

SEQ ID NO: 496 - protein, 328 aa, Artificial Sequence
  synthetic construct; Dicamba decarboxylase variant
MAQGKVALEEHFAIPETLNDAADFVPSEYWKELQHRLLDIQDTRLKLMDKHEIETMILSLAAPAVQAIPDRRKAIEIARRANDFLAEEVAKRPDRFLAFAALPLQDVDAATEELQRCVNDLGFVGAMVNGFSQEGDGQTPLYYDLPQYRPFWGEVEKLDVPFYLHPRNPLPQDSRIYDGHPWLLGPTWAFAQETAVHALRLMASGLFDEHPRLNIILGHMGEGLPYMMYRIDHRIAWVKAPPDYPAKRRFMDYFLENFHITTSGNFRTQTLIDAILEIGADRILFSTDWPFENIDHAADWFNATSIAEADRVKIGRTNARRLFKLDGR

SEQ ID NO: 497 - protein, 328 aa, Artificial Sequence
  synthetic construct; Dicamba decarboxylase variant
MAQGKVALEEHFAIPETLNDAADFVPSEYWKELQHRLLDIQDQRLRLMDKHEIETMILSLAAPAVQSIPDRVKAIEIARRANDFLAEEVAKRPDRFLAFAALPMQDVDAATEELQRCVNDLGFVGAMVNGFSQEGDGQTPLYYDLPQYRPFWKEVEKLDVPFYLHPRNPLPQDSRIYDGHPWLLGPTWAFAQETAVHALRLMASGLFDEHPGLNIILGHLGEGLPYMMYRIDHRIAWVKAPPDYPAKRRFMDYFLENFHITTSGNFRTQTLIDAILEIGADRILFSTDWPFENIDHAADWFNATSIAEADRVKIGRTNARRLFKLDGR

SEQ ID NO: 498 - protein, 328 aa, Artificial Sequence
  synthetic construct; Dicamba decarboxylase variant
MAQGKVALEEHFAIPETLNDAADFVPSEYWKELQHRLLDIQDQRLRLMDKHEIETMILSLAAPAVQAIGDRVKAIEIARRANDFLAEEVAKRPDRFLAFAALPLQDVDAATEELQRCVRDLGFVGAMVNGFSQEGDGQTPLYYDLPQYRPFWKEVEKLDVPFYLHPRNPLPQDSRIYDGHPWLLGPTWAFAQETAVHALRLMASGLFDEHPGLNIILGHMGEGLPYMMYRIDHRIAWVKAPPDYPAKRRFMDYFLENFHITTSGNFRTQTLIDAILEIGADRILFSTDWPFENIDHAADWFNATSIAEADRVKIGRTNARRLFKLDGR

SEQ ID NO: 499 - protein, 328 aa, Artificial Sequence
  synthetic construct; Dicamba decarboxylase variant
MAQGKVALEEHFAIPETLNDAADFVPSEYWKELQHRLLDIQDQRLKLMDKHEIETMILSLAAPAVQSIPDRVKAIEIARRANDFLAEEVAKRPDRFLAFAALPLQDVDAATEELQRCVRDLGFVGAMVNGFSQEGDGQTPLYYDLPQYRPFWKEVEKLDVPFYLHPRNPLPQDSRIYDGHPWLLGPTWAFAQETAVHALRLMASGLFDEHPRLNIILGHLGEGLPYMMYRIDHRIAWVKAPPDYPAKRRFMDYFLENFHITTSGNFRTQTLIDAILEIGADRILFSTDWPFENIDHAAAWFNATSIAEADRVKIGRTNARRLFKLDGR

SEQ ID NO: 500 - protein, 328 aa, Artificial Sequence
  synthetic construct; Dicamba decarboxylase variant
MAQGKVALEEHFAIPETLNDAAGFVPSEYWKELQHRLLDIQDQRLRLMDKHEIETMILSLAAPAVQAIGDRVKAIEIARRANDFLAEEVAKRPDRFLAFAALPMQDVDAATEELQRCVRDLGFVGAMVNGFSQEGDGQTPLYYDLPQYRPFWKEVEKLDVPFYLHPRNPLPQDSRIYDGHPWLLGPTWAFAQETAVHALRLMASGLFDEHPGLNIILGHLGEGLPYMMYRIDHRIAWVKAPPDYPAKRRFMDYFLENFHITTSGNFRTQTLIDAILEIGADRILFSTDWPFENIDHAAAWFNATSIAEADRVKIGRTNARRLFKLDGR

SEQ ID NO: 501 - protein, 328 aa, Artificial Sequence
  synthetic construct; Dicamba decarboxylase variant
MAQGKVALEEHFAIPETLQDAADFVPSEYWKELQHRLLDIQDQRLKLMDKHEIETMILSLAAPAVQSIPDRVKAIEIARRANDFLAEEVAKRPDRFLAFAALPMQDVDAATEELQRCVRDLGFVGAMVNGFSQEGDGQTPLYYDLPQYRPFWKEVEKLDVPFYLHPRNPLPQDSRIYDGHPWLLGPTWAFAQETAVHALRLMASGLFDEHPGLNIILGHMGEGLPYMMYRIDHRIAWVKAPPDYPAKRRFMDYFLENFHITTSGNFRTQTLIDAILEIGADRILFSTDWPFENIDHAADWFNATSIAEADRVKIGRTNARRLFKLDGR

SEQ ID NO: 502 - protein, 328 aa, Artificial Sequence
  synthetic construct; Dicamba decarboxylase variant
MAQGKVALEEHFAIPETLNDAADFVPSEYWKELQHRLLDIQDQRLRLMDKHEIETTILSLAAPAVQAIGDRVKAIEIARRANDFLAEEVAKRPDRFLAFAALPLQDVDAATEELQRCVNDLGFVGAMVNGFSQEGDGQTPLYYDLPQYRPFWKEVEKLDVPFYLHPRNPLPQDSRIYDGHPWLLGPTWAFAQETAVHALRLMASGLFDEHPRLNIILGHMGEGLPYMMYRIDHRIAWVKAPPDYPAKRRFMDYFLENFHITTSGNFRTQTLIDAILEIGADRILFSTDWPFENIDHAADWFNATSIAEADRVKIGRTNARRLFKLDGR

SEQ ID NO: 503 - protein, 328 aa, Artificial Sequence
  synthetic construct; Dicamba decarboxylase variant
MAQGKVALEEHFAIPETLNDAADFVPSEYWKELQHRLLDIQDTRLKLMDKHEIGTMILSLAAPAVQAIPDRVKAIEIARRANDFLAEEVAKRPDRFLAFAALPLQDPDAATEELQRCVNDLGFVGAMVNGFSQEGDGQTPLYYDLPQYRPFWGEVEKLDVPFYLHPRNPLPQDSRIYDGHPWLLGPTWAFAQETAVHALRLMASGLFDEHPRLNIILGHMGEGLPYMMYRIDHRIAWVKAPPDYPAKRRFMDYFLENFHITTSGNFRTQTLIDAILEIGADRILFSTDWPFENIDHAADWFNATSIAEADRVKIGRTNARRLFKLDGR

SEQ ID NO: 504 - protein, 328 aa, Artificial Sequence
  synthetic construct; Dicamba decarboxylase variant
MAQGKVALEEHFAIPETLNDAADFVPSEYWKELQHRLLDIQDTRLKLMDKHEIGTMILSLAAPAVQAIPDRVKAIEIARRANDFLAEEVAKRPDRFLAFAALPLQDPDAATEELQRCVNDLGFVGAMVNGFSQEGDGQTPLYYDLPQYRPFWGEVEQLDVPFYLHPRNPLPQDSRIYDGHPWLLGPTWAFAQETAVHALRLMASGLFDEHPRLNIILGHMGEGLPYMMYRIDHRIAWVKAPPDYPAKRRFMDYFLENFHITTSGNFRTQTLIDAILEIGADRILFSTDWPFENIDHAADWFNATSIAEADRVKIGRTNARRLFKLDGR

SEQ ID NO: 505 - protein, 328 aa, Artificial Sequence
  synthetic construct; Dicamba decarboxylase variant
MAQGKVALEEHFAIPETLQDAADFVPSEYWKELQHRLLDIQDTRLKLMDKHEIETMILSLAAPAVQAIPDRRKAIEIARRANDFLAEEVAKRPDRFLAFAALPLQDVDAATEELQRCVNDLGFVGAMVNGFSQEGDGQTPLYYDLPQYRPFWGEVEKLDVPFYLHPRNPLPQDSRIYDGHPWLLGPTWAFAQETAVHALRLMASGLFDEHPRLNIILGHMGEGLPYMMYRIDHRIAWVKAPPDYPAKRRFMDYFLENFHITTSGNFRTQTLIDAILEIGADRILFSTDWPFENIDHAADWFNATSIAEADRVKIGRTNARRLFKLDGR

SEQ ID NO: 506 - protein, 328 aa, Artificial Sequence
  synthetic construct; Dicamba decarboxylase variant
MAQGKVALEEHFAIPETLNDAADFVPSEYLKELQHRLLDIQDTRLKLMDKHEIETMILSLAAPAVQAIPDRVKAIEIARRANDFLAEEVAKRPDRFLAFAALPLQDPDAATEELQRCVNDLGFVGAMVNGFSQEGDGQTPLYYDLPQYRPFWGEVEKLDVPFYLHPRNPLPQDSRIYDGHPWLLGPTWAFAQETAVHALRLMASGLFDEHPRLNIILGHMGEGLPYMMYRIDHRIAWVKAPPDYPAKRRFMDYFLENFHITTSGNFRTQTLIDAILEIGADRILFSTDWPFENIDHAADWFNATSIAEADRVKIGRTNARRLFKLDGR

SEQ ID NO: 507 - protein, 328 aa, Artificial Sequence
  synthetic construct; Dicamba decarboxylase variant
MAQGKVALEEHFAIPETLQDAADFVPSEYWKELQHRLLDIQDTRLKLMDKHEIETMILSLAAPAVQAIPDRVKAIEIARRANDFLAEEVAKRPGRFLAFAALPLQDVDAATEELQRCVNDLGFVGAMVNGFSQEGDGQTPLYYDLPQYRPFWGEVEKLDVPFYLHPRNPLPQDSRIYDGHPWLLGPTWAFAQETAVHALRLMASGLFDEHPRLNIILGHMGEGLPYMMYRIDHRIAWVKAPPDYPAKRRFMDYFLENFHITTSGNFRTQTLIDAILEIGADRILFSTDWPFENIDHAADWFNATSIAEADRVKIGRTNARRLFKLDGR

SEQ ID NO: 508 - protein, 328 aa, Artificial Sequence
  synthetic construct; Dicamba decarboxylase variant
MAQGKVALEEHFAIPETLNDAAGFVPSEYWKELQHRLLDIQDTRLKLMDKHEIETMILSLAAPAVQAIPDRVKAIEIARRANDFLAEEVAKRPDRFLAFAALPLQDPDAATEELQRCVNDLGFVGALVNGFSQEGDGQTPLYYDLPQYRPFWGEVEKLDVPFYLHPRNPLPQDSRIYDGHPWLLGPTWAFAQETAVHALRLMASGLFDEHPRLNIILGHMGEGLPYMMYRIDHRIAWVKAPPDYPAKRRFMDYFLENFHITTSGNFRTQTLIDAILEIGADRILFSTDWPFENIDHAADWFNATSIAEADRVKIGRTNARRLFKLDGR

SEQ ID NO: 509 - protein, 328 aa, Artificial Sequence
  synthetic construct; Dicamba decarboxylase variant
MAQGKVALEEHFAIPETLQDAAGFVPGDYWKELQHRLLDIQDTRLKEMDKHEIGTMILSLAAPAVQAIPDRRKAIEIARRANDFLAEEVAKRPDRFLAFAALPLQDVDAATEELQRCVNDLGFVGAMVNGFSQEGDGQTPLYYDLPQYRPFWGEVEKLDVPFYLHPRNPLPQDSRIYDGHPWLLGPTWAFAQETAVHALRLMASGLFDEHPRLNIILGHMGEGLPYMMYRIDHRIAWVKAPPDYPAKRRFMDYFLENFHITTSGNFRTQTLIDAILEIGADRILFSTDWPFENIDHAADWFNATSIAEADRVKIGRTNARRLFKLDGR

SEQ ID NO: 510 - protein, 328 aa, Artificial Sequence
  synthetic construct; Dicamba decarboxylase variant
MAQGKVALEEHFAIPETLQDAAGFVPGDYWKELQHRLLDIQDTRLKEMDRHEIGTMVLSLAAPAVQAIPDRRKAIEIARRANDFLAEEVAKRPDRFLAFAALPLQDVDAATEELQRCVNDLGFVGAMVNGFSQEGDGQTPLYYDLPQYRPFWGEVEKLDVPFYLHPRNPLPQDARIYDGHPWLLGPTWAFAQETAVHALRLMASGLFDEHPRLNIILGHMGEGLPYMMYRIDHRIAWVKAPPDYPAKRRFMDYFLENFHITTSGNFRTQTLIDAILEIGADRILFSTDWPFENIDHAADWFAATSIAEADRVKIGRTNARRLFKLDGS

SEQ ID NO: 511 - protein, 328 aa, Artificial Sequence
  synthetic construct; Dicamba decarboxylase variant
MAQGKVALEEHFAIPETLQDAAGFVPGDYWKELQHRLLDIQDTRLKEMDKHGIGTMVLSLAAPAVQAIPDRRQAIELARRANDFLAEEVAKRPDRFLAFAALPLQDVDAATEELQRCVNDLGFVGAMVNGFSQEGDGQTPLYYDLPQYRPFWGEVEKLDVPFYLHPRNPLPQDSRIYDGHPWLLGPTWAFAQETAVHALRLMASGLFDEHPRLNIILGHMGEGLPYMMYRIDHRIAWVKAPPDYPAKRRFMDYFLENFHITTSGNFRTQTLIDAILEIGADRILFSTDWPFENIDHAADWFNATSIAEADRVKIGRTNARRLFKLDGR

SEQ ID NO: 512 - protein, 328 aa, Artificial Sequence
  synthetic construct; Dicamba decarboxylase variant
MAQGKVALEEHFAIPETLQDAAGFVPGDYWKELQHRLLDIQDTRLKEMDKHGIGTMVLSLAAPAVQAIPDRRKAIEIARRANDFLAEEVAKRPDRFLAFAALPLQDVDAATEELQRCVADLGFVGAMVNGFSQEGDGQTPLYYDLPQYRPFWGEVEKLDVPFYLHPRNPLPQDSRIYDGHPWLLGPTWAFAQETAVHALRLMASGLFDEHPRLNIILGHMGEGLPYMMYRIDHRIAWVKAPPDYPAKRRFMDYFLENFHITTSGNFRTQTLIDAILEIGADRILFSTDWPFENIDHAADWFNATSIADADRDKIGRTNARRLFKLDGR

SEQ ID NO: 513 - protein, 328 aa, Artificial Sequence
  synthetic construct; Dicamba decarboxylase variant
MAQGKVALEEHFAIPETLQDAAGFVPGDYWKELQHRLLDIQDTRLKEMDKHEIGTMVLSLAAPAVQAIPDRRQAIELARRANDFLAEEVAKRPDRFLAFAALPLQDVDAATEELQRCVNDLGFVGAMVNGFSQEGDGQTPLYYDLPQYRPFWGEVEKLDVPFYLHPRNPLPQDSRIYDGHPWLLGPTWAFAQETAVHALRLMASGLFDEHPRLNIILGHMGEGLPYMMYRIDHRIAWVKAPPDYPAKRRFMDYFLENFHITTSGNFRTQTLIDAILEIGADRILFSTDWPFENIDHAADWFNATSIAEADRVKIGRTNARRLFKLDGR

SEQ ID NO: 514 - protein, 328 aa, Artificial Sequence
  synthetic construct; Dicamba decarboxylase variant
MAQGKVALEEHFAIPETLQDAAGFVPGDYWKELQHRLLDIQDERLKEMDKHEIGTMILSLAAPAVQAIPDRRKAIELARRANDFLAEEVAKRPDRFLAFAALPLQDVDAATEELQRCVNDLGFVGAMVNGFSQEGDGQTPLYYDLPQYRPFWGEVEKLDVPFYLHPRNPLPQDSRIYDGHPWLLGPTWAFAQETAVHALRLMASGLFDEHPRLNIILGHMGEGLPYMMYRIDHRIAWVKAPPDYPAKRRFMDYFLENFHITTSGNFRTQTLIDAILEIGADRILFSTDWPFENIDHAADWFNATSIAEADRVKIGRTNARRLFKLDGR

SEQ ID NO: 515 - protein, 328 aa, Artificial Sequence
  synthetic construct; Dicamba decarboxylase variant
MAQGKVALEEHFAIPETLQDAAGFVPGDYWKELQHRLLDIQDTRLKEMDKHEIGTMVLSLAAPAVQAIPDRRKAIEIARRANDFLAEEVAKRPDRFLAFAALPLQDVDAATEELQRCVNDLGFVGAMVNGFSQEGDGQTPLYYDLPQYRPFWGEVEKLDVPFYLHPRNPLPQDSRIYDGHPWLLGPTWAFAQETAVHALRLMASGLFDEHPRLNIILGHMGEGLPYMMYRIDHRIAWVKAPPDYPAKRRFMDYFLENFHITTSGNFRTQTLIDAILEIGADRILFSTDWPFENIDHAADWFNATSIAEADRVKIGRTNARRLFKLDGR

SEQ ID NO: 516 - protein, 328 aa, Artificial Sequence
  synthetic construct; Dicamba decarboxylase variant
MAQGKVALEEHFAIPETLQDAAGFVPGDYWKELQHRLLDIQDTRLKEMDKHEIGTMILSLAAPAVQAIPDRRKAIEIARRANDFLAEEVAKRPDRFLAFAALPLQDVDAATEELQRCVNDLGFVGAMVNGFSQEGDGQTPLYYDLPQYRPFWGEVEKLDVPFYLHPRNPLPQDARIYDGHPWLLGPTWAFAQETAVHALRLMASGLFDEHPRLNIILGHMGEGLPYMMYRIDHRIAWVKAPPDYPAKRRFMDYFLENFHITTSGNFRTQTLIDAILEIGADRILFSTDWPFENIDHAADWFNATSIAEADRVKIGRTNARRLFKLDGR

SEQ ID NO: 517 - protein, 328 aa, Artificial Sequence
  synthetic construct; Dicamba decarboxylase variant
MAQGKVALEEHFAIPETLQDAAGFVPGDYWKELQHRLLDIQDTRLKEMDKHGIGTMILSLAAPAVQAIPDRRKAIELARRANDFLAEEVAKRPDRFLAFAALPLQDVDAATEELQRCVNDLGFVGAMVNGFSQEGDGQTPLYYDLPQYRPFWGEVEKLDVPFYLHPRNPLPQDSRIYDGHPWLLGPTWAFAQETAVHALRLMASGLFDEHPRLNIILGHLGEGLPYMMYRIDHRIAWVKAPPDYPAKRRFMDYFLENFHITTSGNFRTQTLIDAILEIGADRILFSTDWPFENIDHAADWFNATSIAEADRVKIGRTNARRLFKLDVR

SEQ ID NO: 518 - protein, 328 aa, Artificial Sequence
  synthetic construct; Dicamba decarboxylase variant
MAQGLVALEEHFAIPETLNDAAGFVPGDYWKELQHRLLDIQDTRLKEMDKHEIGTMVLSLAAPAVQAIPDRRKAIELAKRANDFLAEEVAKRPDRFLAFAALPLQDVDAATEELQRCVADLGFVGAMVNGFSQEGDGQTPLYYDLPQYRPFWGEVEKLDVPFYLHPRNPLPQDSRIYDGHPWLLGPTWAFAQETAVHALRLMASGLFDEHPRLNIILGHMGEGLPYMMYRIDHRIAWVKAPPDYPAKRRFMDYFLENFHITTSGNFRTQTLIDAILEIGADRILFSTDWPFENIDHAADWFNATSIAEADRVKIGRTNARRLFKLDGR

SEQ ID NO: 519 - protein, 328 aa, Artificial Sequence
  synthetic construct; Dicamba decarboxylase variant
MAQGKVALEEHFAIPETLQDAAGFVPGDYWKELQHRLLDIQDTRLKEMDKHEIGTMVLSLAAPAVQAIPDRRKAIEIARRANDFLAEEVAKRPDRFLAFAALPMQDPEAATSELQRCVNDLGFVGAMVNGFSQEGDGQTPLYYDLPQYRPFWGEVEKLDVPFYLHPRNPLPQDSRIYDGHPWLLGPTWAFAQETAVHALRLMASGLFDEHPRLNIILGHMGEGLPYMMYRIDHRIAWVKAPPDYPAKRRFMDYFLENFHITTSGNFRTQTLIDAILEIGADRILFSTDWPFENIDHAADWFNATSIAEADRVKIGRTNARRLFKLDGR

SEQ ID NO: 520 - protein, 328 aa, Artificial Sequence
  synthetic construct; Dicamba decarboxylase variant
MAQGKVALEEHFAIPETLNDAAGFVPGDYWKELQHRLMDIQDTRLKEMDKHEIGTMVLSLAAPAVQAIPDRRKAIEIARRANDFLAEEVAKRPDRFLAFAALPMQDVDAATSELQRCVNDLGFVGAMVNGFSQEGDGQTPLYYDLPQYRPFWGEVEKLDVPFYLHPRNPLPQDSRIYDGHPWLLGPTWAFAQETAVHALRLMASGLFDEHPRLNIILGHMGEGLPYMMYRIDHRIAWVKAPPDYPAKRRFMDYFLENFHITTSGNFRTQTLIDAILEIGADRILFSTDWPFENIDHAADWFNATSIAEADRVKIGRTNARRLFKLDGS

SEQ ID NO: 521 - protein, 328 aa, Artificial Sequence
  synthetic construct; Dicamba decarboxylase variant
MAQGLVALEEHFAIPETLNDAAGFVPGDYWKELQHRLLDIQDTRLKEMDKHGIGTMILSLAAPAVQAIPDRRQAIELARRANDFLAEEVAKRPDRFLAFAALPLQDVDAATEELQRCVADLGFVGAMVNGFSQEGDGQTPLYYDLPQYRPFWGEVEKLDVPFYLHPRNPLPQDSRIYDGHPWLLGPTWAFAQETAVHALRLMASGLFDEHPRLNIILGHMGEGLPYMMYRIDHRIAWVKAPPDYPAKRRFMDYFLENFHITTSGNFRTQTLIDAILEIGADRILFSTDWPFENIDHAADWFNATSIAEADRVKIGRTNARRLFKLDGR

SEQ ID NO: 522 - protein, 328 aa, Artificial Sequence
  synthetic construct; Dicamba decarboxylase variant
MAQGLVALEEHFAIPETLQDAAGFVPGDYWKELQHRLLDIQDTRLKEMDKHEIGTMILSLAAPAVQGIPDRRKAIEIARRANDFLAEEVAKRPDRFLAFAALPLQDVDAATEELQRCVNDLGFVGAMVNGFSQEGDGQTPLYYDLPQYRPFWGEVEKLDVPFYLHPRNPLPQDSRIYDGHPWLLGPTWAFAQETAVHALRLMASGLFDEHPRLNIILGHMGEGLPYMMYRIDHRIAWVKAPPDYPAKRRFMDYFLENFHITTSGNFRTQTLIDAILEIGADRILFSTDWPFENIDHAADWFNATSIAEADRVKIGRTNARRLFKLDGR

SEQ ID NO: 523 - protein, 328 aa, Artificial Sequence
  synthetic construct; Dicamba decarboxylase variant
MAQGLVALEEHFAIPETLQDAAGFVPGDYWKELQHRLLDIQDTRLKEMDKHEIGTMILSLAAPAVQAIPDRRKAIEIARRANDFLAEEVAKRPDRFLAFAALPLQDVDAATEELQRCVNDLGFVGAMVNGFSQEGDGQTPLYYDLPQYRPFWKEVEKLDVPFYLHPRNPLPQDSRIYDGHPWLLGPTWAFAQETAVHALRLMASGLFDEHPRLNIILGHMGEGLPYMMYRIDHRIAWVKAPPRYPAKRRFMDYFLENFHITTSGNFRTQTLIDAILEIGADRILFSTDWPFENIDHAADWFNATSIAEADRVKIGRTNARRLFKLDGR

SEQ ID NO: 524 - protein, 328 aa, Artificial Sequence
  synthetic construct; Dicamba decarboxylase variant
MAQGLVALEEHFAIPETLQDAAGFVPGDYWKELQHRLLDIQDTRLKEMDKHEIGTMILSLAAPAVQAIPDRRKAIEIARRANDFLAEEVAKRPDRFLAFAALPMQDVEAATSELQRCVNDLGFVGAMVNGFSQEGDGQTPLYYDLPQYRPFWKEVEKLDVPFYLHPRNPLPQDSRIYDGHPWLLGPTWAFAQETAVHALRLMASGLFDEHPRLNIILGHMGEGLPYMMYRIDHRIAWVKAPPDYPAKRRFMDYFLENFHITTSGNFRTQTLIDAILEIGADRILFSTDWPFENIDHAADWFNATSIAEADRVKIGRTNARRLFKLDGR

SEQ ID NO: 525 - protein, 328 aa, Artificial Sequence
  synthetic construct; Dicamba decarboxylase variant
MAQGLVALEEHFAIPETLQDAAGFVPGDYWKELQHRLMDIQDERLKEMDKHGIGTMILSLAAPAVQAIPDRRKAIEIARRANDFLAEEVAKRPDRFLAFAALPLQDVDAATSELQRCVADLGFVGAMVNGFSQEGDGQTPLYYDLPQYRPFWGEVEKLDVPFYLHPRNPLPQDSRIYDGHPWLLGPTWAFAQETAVHALRLMASGLFDEHPRLNIILGHMGEGLPYMMYRIDHRIAWVKAPPDYPAKRRFMDYFLENFHITTSGNFRTQTLIDAILEIGADRILFSTDWPFENIDHAADWFNATSIAEADRVKIGRTNARRLFKLDWT

SEQ ID NO: 526 - protein, 328 aa, Artificial Sequence
  synthetic construct; Dicamba decarboxylase variant
MAQGLVALEEHFAIPETLNDAAGFVPGDYWKELQHRLMDMQDTRLKEMDKHEIGTMILSLAAPAVQAIPDRRKAIEIAKRANDFLAEEVAKRPDRFLAFAALPMQDPEAATEELQRCVNDLGFVGAMVNGFSQEGDGQTPLYYDLPQYRPFWGEVEKLDVPFYLHPRNPLPQDSRIYDGHPWLLGPTWAFAQETAVHALRLMASGLFDEHPRLNIILGHMGEGLPYMMYRIDHRIAWVKAPPDYPAKRRFMDYFLENFHITTSGNFRTQTLIDAILEIGADRILFSTDWPFENIDHAADWFNATSIAEADRVKIGRTNARRLFKLDGR

SEQ ID NO: 527 - protein, 328 aa, Artificial Sequence
  synthetic construct; Dicamba decarboxylase variant
MAQGKVALEEHFAIPETLQDAAGFVPGDYWKELQHRLLDIQDTRLKEMDKHEIGTMILSLAAPAVQAIPDRRKAIEIARRANDFLAEEVAKRPDRFLAFAALPLQDVDAATEELQRCVNDLGFVGAMVNGFSQEGDGQTPLYYDLPQYRPFWGEVEKLDVPFYLHPRNPLPQDSRIYDGHPWLLGPTWAFAQETAVHALRLMASGLFDEHPRLNIILGHMGEGLPYMMYRIDHRIAWVKAPPDYPAKRRFMDYFLENFHITTSGNFRTQTLIDAILEIGADRILFSTDWPFENIDHAADWFNATSIAEADRVKIGRTNARRLFKLDVS

SEQ ID NO: 528 - protein, 328 aa, Artificial Sequence
  synthetic construct; Dicamba decarboxylase variant
MAQGKVALEEHFAIPETLQDAAGFVPGDYWKELQHRLLDIQDTRLKEMDKHEIGTMVLSLAAPAVQAIPDRRKAIEIARRANDFLAEEVAKRPDRFLAFAALPLQDPDAATEELQRCVNDLGFVGAMVNGFSQEGDGQTPLYYDLPQYRPFWGEVEKLDVPFYLHPRNPLPQDSRIYDGHPWLLGPTWAFAQETAVHALRLMASGLFDEHPRLNIILGHMGEGLPYMMYRIDHRIAWVKAPPDYPAKRRFMDYFLENFHITTSGNFRTQTLIDAILEIGADRILFSTDWPFENIDHAADWFNATSIAEADRVKIGRTNARRLFKLDGR

SEQ ID NO: 529 - protein, 328 aa, Artificial Sequence
  synthetic construct; Dicamba decarboxylase variant
MAQGLVALEEHFAIPETLQDAAGFVPGDYWKELQHRLLDIQDTRLKEMDKHEIGTMILSLAAPAVQAIPDRRKAIEIARRANDFLAEEVAKRPDRFLAFAALPLQDVDAATEELQRCVADLGFVGAMVNGFSQEGDGQTPLYYDLPQYRPFWGEVEKLDVPFYLHPRNPLPQDSRIYDGHPWLLGPTWAFAQETAVHALRLMASGLFDEHPRLNIILGHMGEGLPYMMYRIDHRIAWVKAPPDYPAKRRFMDYFLENFWITTSGNFRTQTLIDAILEIGADRILFSTDWPFENIDHAADWFNATSIAEADRVKIGRTNARRLFKLDGR

SEQ ID NO: 530 - protein, 328 aa, Artificial Sequence
  synthetic construct; Dicamba decarboxylase variant
MAQGLVALEEHFAIPETLQDAAGFVPGDYWKELQHRLLDIQDTRLKEMDRHEIGTMVLSLAAPAVQAIPDRRQAIELARRANDFLAEEVAKRPDRFLAFAALPMQDVEAATEELQRCVNDLGFVGAMVNGFSQEGDGQTPLYYDLPQYRPFWGEVEKLDVPFYLHPRNPLPQDSRIYDGHPWLLGPTWAFAQETAVHALRLMASGLFDEHPRLNIILGHMGEGLPYMMYRIDHRIAWVKAPPDYPAKRRFMDYFLENFHITTSGNFRTQTLIDAILEIGADRILFSTDWPFENIDHAADWFNATSIAEADRVKIGRTNARRLFKLDGR

SEQ ID NO: 531 - protein, 328 aa, Artificial Sequence
  synthetic construct; Dicamba decarboxylase variant
MAQGLVALEEHFAIPETLQDAAGFVPGCYWKELQHRLLDIQDTRLKEMDKHEIGTMILSLAAPAVQAIPDRRKAIEIARRANDFLAEEVAKRPDRFLAFAALPLQDVDAATEELQRCVNDLGFVGAMVNGFSQEGDGQTPLYYDLPQYRPFWGEVEKLDVPFYLHPRNPLPQDSRIYDGHPWLLGPTWAFAQETAVHALRLMASGLFDEHPRLNIILGHMGEGLPYMMYRIDHRIAWVKAPPDYPAKRRFMDYFLENFHITTSGNFRTQTLIDAILEIGADRILFSTDWPFENIDHAADWFNATSIAEADRVKIGRTNARRLFKLDGS

SEQ ID NO: 532 - protein, 328 aa, Artificial Sequence
  synthetic construct; Dicamba decarboxylase variant
MAQGKVALEEHFAIPETLQDAAGFVPGDYWKELQHRLLDIQDTRLKEMDKHEIGTMVLSLAAPAVQAIPDRRKAIELARRANDFLAEEVAKRPDRFLAFAALPLQDVDAATEELQRCVNDLGFVGAMVNGFSQEGDGQTPLYYDLPQYRPFWGEVEKLDVPFYLHPRNPLPQDARIYDGHPWLLGPTWAFAQETAVHALRLMASGLFDEHPRLNIILGHMGEGLPYMMYRIDHRIAWVKAPPDYPAKRRFMDYFLENFHITTSGNFRTQTLIDAILEIGADRILFSTDWPFENIDHAADWFNATSIAEADRVKIGRTNARRLFKLDGR

SEQ ID NO: 533 - protein, 328 aa, Artificial Sequence
  synthetic construct; Dicamba decarboxylase variant
MAQGKVALEEHFAIPETLQDAAGFVPGCYWKELQHRLLDIQDTRLKEMDKHEIGTMILSLAAPAVQAIPDRRKAIEIARRANDFLAEEVAKRPDRFLAFAALPLQDVDAATEELQRCVADLGFVGAMVNGFSQEGDGQTPLYYDLPQYRPFWGEVEKLDVPFYLHPRNPLPQDARIYDGHPWLLGPTWAFAQETAVHALRLMASGLFDEHPRLNIILGHMGEGLPYMMYRIDHRIAWVKAPPDYPAKRRFMDYFLENFHITTSGNFRTQTLIDAILEIGADRILFSTDWPFENIDHAADWFNATSIAEADRVKIGRTNARRLFKLDGR

SEQ ID NO: 534 - protein, 328 aa, Artificial Sequence
  synthetic construct; Dicamba decarboxylase variant
MAQGLVALEEHFAIPETLQDAAGFVPGDYWKELQHRLLDIQDTRLKEMDKHEIGTMILSLAAPAVQAIPDRRKAIEIARRANDFLAEEVAKRPDRFLAFAALPLQDVDAATEELQRCVNDLGFVGAMVNGFSQEGDGQTPLYYDLPQYRPFWGEVEKLDVPFYLHPRNPLPQDSRIYDGHPWLLGPTWAFAQETAVHALRLMASGLFDEHPRLNIILGHMGEGLPYMMYRIDHRIAWVKAPPDYPAKRRFMDYFLENFHITTSGNFRTQTLIDAILEIGADRILFSTDWPFENIDHAADWFNATSIAEADRVKIGRTNARRLFKLDGR

SEQ ID NO: 535 - protein, 328 aa, Artificial Sequence
  synthetic construct; Dicamba decarboxylase variant
MAQGKVALEEHFAIPETLQDAAGFVPGDYWKELQHRLLDIQDTRLKEMDKHEIGTMVLSLAAPAVQAIPDRRKAIELARRANDFLAEEVAKRPDRFLAFAALPMQDPDAATEELQRCVADLGFVGAMVNGFSQEGDGQTPLYYDLPQYRPFWKEVEKLDVPFYLHPRNPLPQDARIYDGHPWLLGPTWAFAQETAVHALRLMASGLFDEHPRLNIILGHMGEGLPYMMYRIDHRIAWVKAPPDYPAKRRFMDYFLENFWITTSGNFRTQTLIDAILEIGADRILFSTDWPFENIDHAADWFNATSIAEADRVKIGRTNARRLFKLDGR

SEQ ID NO: 536 - protein, 328 aa, Artificial Sequence
  synthetic construct; Dicamba decarboxylase variant
MAQGKVALEEHFAIPETLQDAAGFVPGDYWKELQHRLLDIQDERLKEMDKHEIGTMVLSLAAPAVQAIPDRRKAIELAKRANDFLAEEVAKRPDRFLAFAALPLQDVDAATEELQRCVNDLGFVGAMVNGFSQEGDGQTPLYYDLPQYRPFWGEVEKLDVPFYLHPRNPLPQDSRIYDGHPWLLGPTWAFAQETAVHALRLMASGLFDEHPRLNIILGHMGEGLPYMMYRIDHRIAWVKAPPDYPAKRRFMDYFLENFHITTSGNFRTQTLIDAILEIGADRILFSTDWPFENIDHAADWFAATSIAEADRVKIGRTNARRLFKLDGR

SEQ ID NO: 537 - protein, 328 aa, Artificial Sequence
  synthetic construct; Dicamba decarboxylase variant
MAQGKVALEEHFAIPETLQDAAGFVPGDYWKELQHRLLDIQDTRLKEMDKHEIGTMVLSLAAPAVQAIPDRRKAIELARRANDFLAEEVAKRPDRFLAFAALPLQDVDAATEELQRCVNDLGFVGAMVNGFSQEGDGQTPLYYDLPQYRPFWGEVEKLDVPFYLHPRNPLPQDARIYDGHPWLLGPTWAFAQETAVHALRLMASGLFDEHPRLNIILGHMGEGLPYMMYRIDHRIAWVKAPPDYPAKRRFMDYFLENFWITTSGNFRTQTLIDAILEIGADRILFSTDWPFENIDHAADWFNATSIAEADRVKIGRTNARNLFKLDVR

SEQ ID NO: 538 - protein, 328 aa, Artificial Sequence
  synthetic construct; Dicamba decarboxylase variant
MAQGKVALEEHFAIPETLQDAAGFVPGDYWKELQHRLMDIQDTRLKEMDKHEIGTMVLSLAAPAVQAIPDRRKAIEIARRANDFLAEEVAKRPDRFLAFAALPMQDPEAATSELQRCVADLGFVGAMVNGFSQEGDGQTPLYYDLPQYRPFWGEVEKLDVPFYLHPRNPLPQDARIYDGHPWLLGPTWAFAQETAVHALRLMASGLFDEHPRLNIILGHMGEGLPYMMYRIDHRIAWVKAPPDYPAKRRFMDYFLENFHITTSGNFRTQTLIDAILEIGADRILFSTDWPFENIDHAADWFNATSIAEADRVKIGRTNARRLFKLDGR

SEQ ID NO: 539 - protein, 328 aa, Artificial Sequence
  synthetic construct; Dicamba decarboxylase variant
MAQGLVALEEHFAIPETLQDAAGFVPGDYWKELQHRLLDMQDERLKEMDKHEIGTMVLSLAAPAVQAIPDRRQAIELARRANDFLAEEVAKRPDRFLAFAALPLQDVDAATEELQRCVNDLGFVGAMVNGFSQEGDGQTPLYYDLPQYRPFWKEVEKLDVPFYLHPRNPLPQDSRIYDGHPWLLGPTWAFAQETAVHALRLMASGLFDEHPRLNIILGHMGEGLPYMMYRIDHRIAWVKAPPDYPAKRRFMDYFLENFHITTSGNFRTQTLIDAILEIGADRILFSTDWPFENIDHAADWFNATSIAEADRVKIGRTNARRLFKLDGR

SEQ ID NO: 540 - protein, 328 aa, Artificial Sequence
  synthetic construct; Dicamba decarboxylase variant
MAQGLVALEEHFAIPETLNDAAGFVPGDYWKELQHRLLDIQDTRLKEMDKHEIGTMILSLAAPAVQGIVDRRKAIELAKRANDFLAEEVAKRPDRFLAFAALPLQDVDAATEELQRCVNDLGFVGAMVNGFSQEGDGQTPLYYDLPQYRPFWGEVEKLDVPFYLHPRNPLPQDARIYDGHPWLLGPTWAFAQETAVHALRLMASGLFDEHPRLNIILGHMGEGLPYMMYRIDHRIAWVHAPPRYPAKRRFMDYFLENFHITTSGNFRTQTLIDAILEIGADRILFSTDWPFENIDHAADWFNATSIAEADRVKIGRTNARRLFKLDVS

SEQ ID NO: 541 - protein, 328 aa, Artificial Sequence
  synthetic construct; Dicamba decarboxylase variant
MAQGKVALEEHFAIPETLNDAAGFVPGDYWKELQHRLLDIQDTRLKEMDRHGIGTMILSLAAPAVQAIPDRRKAIEIARRANDFLAEEVAKRPDRFLAFAALPLQDVDAATEELQRCVNDLGFVGAMVNGFSQEGDGQTPLYYDLPQYRPFWGEVEKLDVPFYLHPRNPLPQDSRIYDGHPWLLGPTWAFAQETAVHALRLMASGLFDEHPRLNIILGHMGEGLPYMMYRIDHRIAWVKAPPDYPAKRRFMDYFLENFHITTSGNFRTQTLIDAILEIGADRILFSTDWPFENIDHAADWFNATSIAEADRVKIGRTNARRLFKLDGR

SEQ ID NO: 542 - protein, 328 aa, Artificial Sequence
  synthetic construct; Dicamba decarboxylase variant
MAQGKVALEEHFAIPETLQDAAGFVPGDYWKELQHRLLDIQDTRLKEMDRHGIGTMVLSLAAPAVQAIPDRRKAIEIARRANDFLAEEVAKRPDRFLAFAALPLQDVDAATEELQRCVADLGFVGAMVNGFSQEGDGQTPLYYDLPQYRPFWKEVEKLDVPFYLHPRNPLPQDSRIYDGHPWLLGPTWAFAQETAVHALRLMASGLFDEHPRLNIILGHMGEGLPYMMYRIDHRIAWVKAPPDYPAKRRFMDYFLENFHITTSGNFRTQTLIDAILEIGADRILFSTDWPFENIDHAADWFAATSIAEADRVKIGRTNARRLFKLDGR

SEQ ID NO: 543 - protein, 328 aa, Artificial Sequence
  synthetic construct; Dicamba decarboxylase variant
MAQGLVALEEHFAIPETLQDAAGFVPGDYWKELQHRLLDIQDTRLKEMDKHGIGTMVLSLAAPAVQAIPDRRKAIEIARRANDFLAEEVAKRPDRFLAFAALPLQDVDAATEELQRCVNDLGFVGAMVNGFSQEGDGQTPLYYDLPQYRPFWGEVEKLDVPFYLHPRNPLPQDARIYDGHPWLLGPTWAFAQETAVHALRLMASGLFDEHPRLNIILGHLGEGLPYMMYRIDHRIAWVKAPPDYPAKRRFMDYFLENFWITTSGNFRTQTLIDAILEIGADRILFSTDWPFENIDHAADWFNATSIAEADRVKIGRTNARRLFKLDVR

SEQ ID NO: 544 - protein, 328 aa, Artificial Sequence
  synthetic construct; Dicamba decarboxylase variant
MAQGKVALEEHFAIPETLQDAAGFVPGDYWKELQHRLLDIQDTRLKEMDKHEIGTMVLSLAAPAVQAIPDRRKAIELARRANDFLAEEVAKRPDRFLAFAALPLQDVDAATSELQRCVNDLGFVGAMVNGFSQEGDGQTPLYYDLPQYRPFWGEVEKLDVPFYLHPRNPLPQDSRIYDGHPWLLGPTWAFAQETAVHALRLMASGLFDEHPRLNIILGHLGEGLPYMMYRIDHRIAWVKAPPDYPAKRRFMDYFLENFWITTSGNFRTQTLIDAILEIGADRILFSTDWPFENIDHAADWFNATSIAEADRVKIGRTNARNLFKLDVS

SEQ ID NO: 545 - protein, 328 aa, Artificial Sequence
  synthetic construct; Dicamba decarboxylase variant
MAQGLVALEEHFAIPETLQDAAGFVPGDYWKELQHRLLDMQDTRLKEMDRHGIGTMVLSLAAPAVQAIPDRRKAIELARRANDFLAEEVAKRPDRFLAFAALPLQDVDAATEELQRCVNDLGFVGAMVNGFSQEGDGQTPLYYDLPQYRPFWGEVEKLDVPFYLHPRNPLPQDARIYDGHPWLLGPTWAFAQETAVHALRLMASGLFDEHPRLNIILGHMGEGLPYMMYRIDHRIAWVKAPPDYPAKRRFMDYFLENFHITTSGNFRTQTLIDAILEIGADRILFSTDWPFENIDHAADWFNATSIAEADRVKIGRTNARRLFKLDGR

SEQ ID NO: 546 - protein, 328 aa, Artificial Sequence
  synthetic construct; Dicamba decarboxylase variant
MAQGKVALEEHFAIPETLQDAAGFVPGDYWKELQHRLLDMQDTRLKEMDKHGIGTMVLSLAAPAVQAIVDRRKAIELARRANDFLAEEVAKRPDRFLAFAALPLQDVDAATEELQRCVNDLGFVGAMVNGFSQEGDGQTPLYYDLPQYRPFWGEVEKLDVPFYLHPRNPLPQDSRIYDGHPWLLGPTWAFAQETAVHALRLMASGLFDEHPRLNIILGHMGEGLPYMMYRIDHRIAWVKAPPDYPAKRRFMDYFLENFHITTSGNFRTQTLIDAILEIGADRILFSTDWPFENIDHAADWFAATSIAEADRVKIGRTNARRLFKLDGR

SEQ ID NO: 547 - protein, 328 aa, Artificial Sequence
  synthetic construct; Dicamba decarboxylase variant
MAQGLVALEEHFAIPETLQDAAGFVPGDYWKELQHRLLDIQDTRLKEMDKHEIGTMILSLAAPAVQAIPDRRKAIELAKRANDFLAEEVAKRPDRFLAFAALPMQDVDAATEELQRCVADLGFVGAMVNGFSQEGDGQTPLYYDLPQYRPFWKEVEKLDVPFYLHPRNPLPQDARIYDGHPWLLGPTWAFAQETAVHALRLMASGLFDEHPRLNIILGHMGEGLPYMMYRIDHRIAWVKAPPRYPAKRRFMDYFLENFHITTSGNFRTQTLIDAILEIGADRILFSTDWPFENIDHAADWFNATSIAEADRVKIGRTNARRLFKLDVR

SEQ ID NO: 548 - protein, 328 aa, Artificial Sequence
  synthetic construct; Dicamba decarboxylase variant
MAQGKVALEEHFAIPETLQDAAGFVPGDYWKELQHRLMDIQDTRLKEMDRHGIGTMVLSLAAPAVQAIPDRRKAIEIARRANDFLAEEVAKRPDRFLAFAALPMQDPEAATSELQRCVADLGFVGAMVNGFSQEGDGQTPLYYDLPQYRPFWGEVEKLDVPFYLHPRNPLPQDARIYDGHPWLLGPTWAFAQETAVHALRLMASGLFDEHPRLNIILGHMGEGLPYMMYRIDHRIAWVKAPPDYPAKRRFMDYFLENFHITTSGNFRTQTLIDAILEIGADRILFSTDWPFENIDHAADWFNATSIAEADRVKIGRTNARNLFKLDVR

SEQ ID NO: 549 - protein, 328 aa, Artificial Sequence
  synthetic construct; Dicamba decarboxylase variant
MAQGLVALEEHFAIPETLQDAAGFVPGCYWKELQHRLLDIQDTRLKEMDRHEIGTMVLSLAAPAVQAIPDRRKAIELAKRANDFLAEEVAKRPDRFLAFAALPLQDVDAATEELQRCVNDLGFVGAMVNGFSQEGDGQTPLYYDLPQYRPFWGEVEKLDVPFYLHPRNPLPQDARIYDGHPWLLGPTWAFAQETAVHALRLMASGLFDEHPRLNIILGHMGEGLPYMMYRIDHRIAWVKAPPDYPAKRRFMDYFLENFHITTSGNFRTQTLIDAILEIGADRILFSTDWPFENIDHAADWFAATSIAEADRVKIGRTNARRLFKLDGS

SEQ ID NO: 550 - protein, 328 aa, Artificial Sequence
  synthetic construct; Dicamba decarboxylase variant
MAQGKVALEEHFAIPETLQDAAGFVPGCYWKELQHRLLDIQDTRLKEMDKHEIGTMVLSLAAPAVQAIPDRRKAIELARRANDFLAEEVAKRPDRFLAFAALPLQDVDAATEELQRCVNDLGFVGAMVNGFSQEGDGQTPLYYDLPQYRPFWGEVEKLDVPFYLHPRNPLPQDSRIYDGHPWLLGPTWAFAQETAVHALRLMASGLFDEHPRLNIILGHMGEGLPYMMYRIDHRIAWVKAPPRYPAKRRFMDYFLENFHITTSGNFRTQTLIDAILEIGADRILFSTDWPFENIDHAADWFAATSIAEADRVKIGRTNARRLFKLDVR

SEQ ID NO: 551 - protein, 328 aa, Artificial Sequence
  synthetic construct; Dicamba decarboxylase variant
MAQGKVALEEHFAIPETLQDAAGFVPGDYWKELQHRLLDMQDERLKEMDKHEIGTMVLSLAAPAVQAIPDRRKAIELARRANDFLAEEVAKRPDRFLAFAALPLQDVDAATEELQRCVNDLGFVGAMVNGFSQEGDGQTPLYYDLPQYRPFWGEVEKLDVPFYLHPRNPLPQDSRIYDGHPWLLGPTWAFAQETAVHALRLMASGLFDEHPRLNIILGHMGEGLPYMMYRIDHRIAWVKAPPDYPAKRRFMDYFLENFHITTSGNFRTQTLIDAILEIGADRILFSTDWPFENIDHAADWFNATSIAEADRVKIGRTNARRLFKLDGR

SEQ ID NO: 552 - protein, 328 aa, Artificial Sequence
  synthetic construct; Dicamba decarboxylase variant
MAQGLVALEEHFAIPETLQDAAGFVPGDYWKELQHRLLDIQDTRLKEMDKHGIGTMILSLAAPAVQAIPDRRKAIELARRANDFLAEEVAKRPDRFLAFAALPLQDVDAATEELQRCVADLGFVGAMVNGFSQEGDGQTPLYYDLPQYRPFWKEVEKLDVPFYLHPRNPLPQDSRIYDGHPWLLGPTWAFAQETAVHALRLMASGLFDEHPRLNIILGHMGEGLPYMMYRIDHRIAWVKAPPDYPAKRRFMDYFLENFHITTSGNFRTQTLIDAILEIGADRILFSTDWPFENIDHAADWFNATSIAEADRVKIGRTNARNLFKLDGR

SEQ ID NO: 553 - protein, 328 aa, Artificial Sequence
  synthetic construct; Dicamba decarboxylase variant
MAQGLVALEEHFAIPETLQDAAGFVPGCYWKELQHRLLDIQDTRLKEMDKHEIGTMVLSLAAPAVQAIPDRRKAIEIARRANDFLAEEVAKRPDRFLAFAALPLQDVDAATEELQRCVADLGFVGAMVNGFSQEGDGQTPLYYDLPQYRPFWGEVEKLDVPFYLHPRNPLPQDSRIYDGHPWLLGPTWAFAQETAVHALRLMASGLFDEHPRLNIILGHMGEGLPYMMYRIDHRIAWVKAPPDYPAKRRFMDYFLENFWITTSGNFRTQTLIDAILEIGADRILFSTDWPFENIDHAADWFNATSIAEADRVKIGRTNARRLFKLDVR

SEQ ID NO: 554 - protein, 328 aa, Artificial Sequence
  synthetic construct; Dicamba decarboxylase variant
MAQGLVALEEHFAIPETLQDAAGFVPGDYWKELQHRLMDIQDTRLKEMDKHGIGTMVLSLAAPAVQGIVDRRKAIEIAKRANDFLAEEVAKRPDRFLAFAALPLQDVDAATEELQRCVADLGFVGAMVNGFSQEGDGQTPLYYDLPQYRPFWGEVEKLDVPFYLHPRNPLPQDARIYDGHPWLLGPTWAFAQETAVHALRLMASGLFDEHPRLNIILGHLGEGLPYMMYRIDHRIAWVKAPPDYPAKRRFMDYFLENFWITTSGNFRTQTLIDAILEIGADRILFSTDWPFENIDHAADWFAATSIAEADRVKIGRTNARRLFKLDVS

SEQ ID NO: 555 - protein, 328 aa, Artificial Sequence
  synthetic construct; Dicamba decarboxylase variant
MAQGKVALEEHFAIPETLQDAAGFVPGCYWKELQHRLMDIQDTRLKEMDKHEIGTMVLSLAAPAVQAIPDRRKAIEIARRANDFLAEEVAKRPDRFLAFAALPLQDVDAATEELQRCVNDLGFVGAMVNGFSQEGDGQTPLYYDLPQYRPFWGEVEKLDVPFYLHPRNPLPQDARIYDGHPWLLGPTWAFAQETAVHALRLMASGLFDEHPRLNIILGHMGEGLPYMMYRIDHRIAWVKAPPDYPAKRRFMDYFLENFHITTSGNFRTQTLIDAILEIGADRILFSTDWPFENIGHAADWFNATSIAEADRVKIGRTNARRLFKLDVS

SEQ ID NO: 556 - protein, 328 aa, Artificial Sequence
  synthetic construct; Dicamba decarboxylase variant
MAQGLVALEEHFAIPETLNDAAGFVPGCYWKELQHRLLDIQDTRLKEMDKHGIGTMILSLAAPAVQAIPDRRKAIELARRANDFLAEEVAKRPDRFLAFAALPMQDPDAATEELQRCVADLGFVGAMVNGFSQEGDGQTPLYYDLPQYRPFWKEVEKLDVPFYLHPRNPLPQDARIYDGHPWLLGPTWAFAQETAVHALRLMASGLFDEHPRLNIILGHMGEGLPYMMYRIDHRIAWVKAPPDYPAKRRFMDYFLENFHITTSGNFRTQTLIDAILEIGADRILFSTDWPFENIDHAADWFAATSIAEADRVKIGRTNARRLFKLDVR

SEQ ID NO: 557 - protein, 328 aa, Artificial Sequence
  synthetic construct; Dicamba decarboxylase variant
MAQGLVALEEHFAIPETLQDAAGFVPGDYWKELQHRLLDMQDTRLKEMDKHEIGTMILSLAAPAVQAIPDRRKAIELARRANDFLAEEVAKRPDRFLAFAALPLQDVDAATEELQRCVADLGFVGAMVNGFSQEGDGQTPLYYDLPQYRPFWGEVEKLDVPFYLHPRNPLPQDARIYDGHPWLLGPTWAFAQETAVHALRLMASGLFDEHPRLNIILGHLGEGLPYMMYRIDHRIAWVKAPPDYPAKRRFMDYFLENFWITTSGNFRTQTLIDAILEIGADRILFSTDWPFENIDHAADWFAATSIAEADRVKIGRTNARRLFKLDGR

SEQ ID NO: 558 - protein, 328 aa, Artificial Sequence
  synthetic construct; Dicamba decarboxylase variant
MAQGLVALEEHFAIPETLQDAAGFVPGDYWKELQHRLLDMQDTRLKEMDKHGIGTMILSLAAPAVQAIPDRRKAIEIARRANDFLAEEVAKRPDRFLAFAALPLQDVDAATEELQRCVADLGFVGAMVNGFSQEGDGQTPLYYDLPQYRPFWKEVEKLDVPFYLHPRNPLPQDARIYDGHPWLLGPTWAFAQETAVHALRLMASGLFDEHPRLNIILGHMGEGLPYMMYRIDHRIAWVKAPPDYPAKRRFMDYFLENFHITTSGNFRTQTLIDAILEIGADRILFSTDWPFENIDHAADWFNATSIAEADRVKIGRTNARNLFKLDVS

SEQ ID NO: 559 - protein, 328 aa, Artificial Sequence
  synthetic construct; Dicamba decarboxylase variant
MAQGLVALEEHFAIPETLNDAAGFVPGCYWKELQHRLMDMHETRLKEMDKHGIGTMVLSLAAPAVQAIPDRRKAIEIARRANDFLAEEVAKRPDRFLAFAALPMQDPDAATEELQRCVNDLGFVGAMVNGFSQEGDGQTPLYYDLPQYRPFWGEVEKLDVPFYLHPRNPLPQDARIYDGHPWLLGPTWAFAQETAVHALRLMASGLFDEHPRLNIILGHMGEGLPYMMYRIDHRIAWVKAPPDYPAKRRFMDYFLENFHITTSGNFRTQTLIDAILEIGADRILFSTDWPFENIDHAADWFNATSIAEADRVKIGRTNARNLFKLDGS

SEQ ID NO: 560 - protein, 328 aa, Artificial Sequence
  synthetic construct; Dicamba decarboxylase variant
MAQGKVALEEHFAIPETLNDAAGFVPGDYWKELQHRLLDIQDTRLKEMDKHEIGTMILSLAAPAVQAIPDRRKAIEIARRANDFLAEEVAKRPDRFLAFAALPLQDVDAATSELQRCVADLGFVGAMVNGFSQEGDGQTPLYYDLPQYRPFWGEVEKLDVPFYLHPRNPLPQDSRIYDGHPWLLGPTWAFAQETAVHALRLMASGLFDEHPRLNIILGHLGEGLPYMMYRIDHRIAWVKAPPRYPAKRRFMDYFLENFHITTSGNFRTQTLIDAILEIGADRILFSTDWPFENIDHAADWFNATSIAEADRVKIGRTNARRLFKLDVR

SEQ ID NO: 561 - protein, 328 aa, Artificial Sequence
  synthetic construct; Dicamba decarboxylase variant
MAQGLVALEEHFAIPETLQDAAGFVPGDYWKELQHRLMDMQDTRLKEMDKHGIGTMVLSLAAPAVQAIPDRRQAIEIARRANDFLAEEVAKRPDRFLAFAALPMQDPDAATEELQRCVADLGFVGAMVNGFSQEGDGQTPLYYDLPQYRPFWGEVEKLDVPFYLHPRNPLPQDARIYDGHPWLLGPTWAFAQETAVHALRLMASGLFDEHPRLNIILGHMGEGLPYMMYRIDHRIAWVKAPPRYPAKRRFMDYFLENFHITTSGNFRTQTLIDAILEIGADRILFSTDWPFENIDHAADWFAATSIAEADRVKIGRTNARRLFKLDVR

SEQ ID NO: 562 - protein, 328 aa, Artificial Sequence
  synthetic construct; Dicamba decarboxylase variant
MAQGKVALEEHFAIPETLNDAAGFVPGDYWKELQHRLLDIQDTRLKEMDKHEIGTMVLSLAAPAVQAIPDRRKAIELARRANDFLAEEVAKRPDRFLAFAALPLQDVDAATEELQRCVADLGFVGAMVNGFSQEGDGQTPLYYDLPQYRPFWGEVEKLDVPFYLHPRNPLPQDARIYDGHPWLLGPTWAFAQETAVHALRLMASGLFDEHPRLNIILGHMGEGLPYMMYRIDHRIAWVKAPPRYPAKRRFMDYFLENFHITTSGNFRTQTLIDAILEIGADRILFSTDWPFENIDHAADWFAATSIAEADRVKIGRTNARRLFKLDGR

SEQ ID NO: 563 - protein, 328 aa, Artificial Sequence
  synthetic construct; Dicamba decarboxylase variant
MAQGKVALEEHFAIPETLQDAAGFVPGDYWKELQHRLLDIQDERLKEMDKHEIGTMILSLAAPAVQAIPDRRKAIEIARRANDFLAEEVAKRPDRFLAFAALPLQDVDAATEELQRCVNDLGFVGAMVNGFSQEGDGQTPLYYDLPQYRPFWGEVEKLDVPFYLHPRNPLPQDARIYDGHPWLLGPTWAFAQETAVHALRLMASGLFDEHPRLNIILGHLGEGLPYMMYRIDHRIAWVKAPPDYPAKRRFMDYFLENFHITTSGNFRTQTLIDAILEIGADRILFSTDWPFENIDHAADWFAATSIAEADRVKIGRTNARRLFKLDGR

SEQ ID NO: 564 - protein, 328 aa, Artificial Sequence
  synthetic construct; Dicamba decarboxylase variant
MAQGLVALEEHFAIPETLQDAAGFVPGDYWKELQHRLLDIQDTRLKEMDKHEIGTMVLSLAAPAVQAIPDRRKAIEIARRANDFLAEEVAKRPDRFLAFAALPLQDVDAATEELQRCVADLGFVGAMVNGFSQEGDGQTPLYYDLPQYRPFWGEVEKLDVPFYLHPRNPLPQDARIYDGHPWLLGPTWAFAQETAVHALRLMASGLFDEHPRLNIILGHMGEGLPYMMYRIDHRIAWVKAPPDYPAKRRFMDYFLENFHITTSGNFRTQTLIDAILEIGADRILFSTDWPFENIDHAADWFNATSIAEADRVKIGRTNARRLFKLDGR

SEQ ID NO: 565 - protein, 328 aa, Artificial Sequence
  synthetic construct; Dicamba decarboxylase variant
MAQGLVALEEHFAIPETLNDAADFVPGDYWKELQHRLLDIQDTRLKEMDKHGIGTMILSLAAPAVQAIPDRRKAIELARRANDFLAEEVAKRPDRFLAFAALPLQDVDAATEELQRCVADLGFVGAMVNGFSQEGDGQTPLYYDLPQYRPFWGEVEKLDVPFYLHPRNPLPQDSRIYDGHPWLLGPTWAFAQETAVHALRLMASGLFDEHPRLNIILGHMGEGLPYMMYRIDHRIAWVKAPPDYPAKRRFMDYFLENFHITTSGNFRTQTLIDAILEIGADRILFSTDWPFENIDHAADWFNATSIAEADRVKIGRTNARRLFKLDGR

SEQ ID NO: 566 - protein, 328 aa, Artificial Sequence
  synthetic construct; Dicamba decarboxylase variant
MAQGKVALEEHFAIPETLQDAAGFVPGDYWKELQHRLLDIQDTRLKEMDRHEIGTMVLSLAAPAVQAIPDRRKAIEIARRANDFLAEEVAKRPDRFLAFAALPMQDVDAATEELQRCVNDLGFVGAMVNGFSQEGDGQTPLYYDLPQYRPFWGEVEKLDVPFYLHPRNPLPQDSRIYDGHPWLLGPTWAFAQETAVHALRLMASGLFDEHPRLNIILGHLGEGLPYMMYRIDHRIAWVKAPPDYPAKRRFMDYFLENFHITTSGNFRTQTLIDAILEIGADRILFSTDWPFENIDHAADWFNATSIAEADRVKIGRTNARRLFKLDGR

SEQ ID NO: 567 - protein, 328 aa, Artificial Sequence
  synthetic construct; Dicamba decarboxylase variant
MAQGLVALEEHFAIPETLQDAAGFVPGDYWKELQHRLLDIQDTRLKEMDKHEIGTMVLSLAAPAVQAIPDRRKAIEIARRANDFLAEEVAKRPDRFLAFAALPMQDPEAATEELQRCVADLGFVGAMVNGFSQEGDGQTPLYYDLPQYRPFWGEVEKLDVPFYLHPRNPLPQDSRIYDGHPWLLGPTWAFAQETAVHALRLMASGLFDEHPRLNIILGHLGEGLPYMMYRIDHRIAWVKAPPDYPAKRRFMDYFLENFHITTSGNFRTQTLIDAILEIGADRILFSTDWPFENIDHAADWFAATSIAEADRVKIGRTNARRLFKLDVR

SEQ ID NO: 568 - protein, 328 aa, Artificial Sequence
  synthetic construct; Dicamba decarboxylase variant
MAQGLVALEEHFAIPETLQDAAGFVPGDYWKELQHRLLDIQDTRLKEMDKHEIGTMVLSLAAPAVQAIPDRRKAIELARRANDFLAEEVAKRPDRFLAFAALPMQDPEAATEELQRCVADLGFVGAMVNGFSQEGDGQTPLYYDLPQYRPFWGEVEKLDVPFYLHPRNPLPQDARIYDGHPWLLGPTWAFAQETAVHALRLMASGLFDEHPRLNIILGHLGEGLPYMMYRIDHRIAWVKAPPDYPAKRRFMDYFLENFHITTSGNFRTQTLIDAILEIGADRILFSTDWPFENIDHAADWFNATSIAEADRVKIGRTNARRLFKLDGR

SEQ ID NO: 569 - protein, 328 aa, Artificial Sequence
  synthetic construct; Dicamba decarboxylase variant
MAQGLVALEEHFAIPETLQDAAGFVPGDYWKELQHRLLDIQDTRLKEMDKHEIGTMILSLAAPAVQAIPDRRKAIEIAKRANDFLAEEVAKRPDRFLAFAALPLQDVEAATSELQRCVNDLGFVGAMVNGFSQEGDGQTPLYYDLPQYRPFWGEVEKLDVPFYLHPRNPLPQDSRIYDGHPWLLGPTWAFAQETAVHALRLMASGLFDEHPRLNIILGHMGEGLPYMMYRIDHRIAWVKAPPRYPAKRRFMDYFLENFHITTSGNFRTQTLIDAILEIGADRILFSTDWPFENIDHAADWFAATSIAEADRVKIGRTNARRLFKLDVS

SEQ ID NO: 570 - protein, 328 aa, Artificial Sequence
  synthetic construct; Dicamba decarboxylase variant
MAQGLVALEEHFAIPETLQDAAGFVPGDYWKELQHRLLDMQDTRLKEMDKHGIGTMILSLAAPAVQAIPDRRKAIEIARRANDFLAEEVAKRPDRFLAFAALPLQDPEAATEELQRCVADLGFVGAMVNGFSQEGDGQTPLYYDLPQYRPFWGEVEKLDVPFYLHPRNPLPQDSRIYDGHPWLLGPTWAFAQETAVHALRLMASGLFDEHPRLNIILGHMGEGLPYMMYRIDHRIAWVKAPPDYPAKRRFMDYFLENFHITTSGNFRTQTLIDAILEIGADRILFSTDWPFENIDHAADWFNATSIAEADRVKIGRTNARRLFKLDVR

SEQ ID NO: 571 - protein, 328 aa, Artificial Sequence
  synthetic construct; Dicamba decarboxylase variant
MAQGLVALEEHFAIPETLQDAAGFVPGDYWKELQHRLLDIQDTRLKEMDKHGIGTMILSLAAPAVQAIPDRRQAIELARRANDFLAEEVAKRPDRFLAFAALPLQDVDAATSELQRCVADLGFVGAMVNGFSQEGDGQTPLYYDLPQYRPFWGEVEKLDVPFYLHPRNPLPQDARIYDGHPWLLGPTWAFAQETAVHALRLMASGLFDEHPRLNIILGHLGEGLPYMMYRIDHRIAWVKAPPDYPAKRRFMDYFLENFHITTSGNFRTQTLIDAILEIGADRILFSTDWPFENIDHAADWFNATSIAEADRVKIGRTNARRLFKLDGR

SEQ ID NO: 572 - protein, 328 aa, Artificial Sequence
  synthetic construct; Dicamba decarboxylase variant
MAQGKVALEEHFAIPETLQDAAGFVPGDYWKELQHRLLDIQDTRLKEMDKHEIGTMILSLAAPAVQAIPDRRKAIELAKRANDFLAEEVAKRPDRFLAFAALPLQDVDAATEELQRCVADLGFVGAMVNGFSQEGDGQTPLYYDLPQYRPFWGEVEKLDVPFYLHPRNPLPQDSRIYDGHPWLLGPTWAFAQETAVHALRLMASGLFDEHPRLNIILGHMGEGLPYMMYRIDHRIAWVKAPPDYPAKRRFMDYFLENFWITTSGNFRTQTLIDAILEIGADRILFSTDWPFENIDHAADWFNATSIAEADRVKIGRTNARRLFKLDGR

SEQ ID NO: 573 - protein, 328 aa, Artificial Sequence
  synthetic construct; Dicamba decarboxylase variant
MAQGLVALEEHFAIPETLNDAAGFVPGDYWKELQHRLLDIQDTRLKEMDKHGIGTMVLSLAAPAVQAIPDRRKAIEIARRANDFLAEEVAKRPDRFLAFAALPMQDVDAATEELQRCVNDLGFVGAMVNGFSQEGDGQTPLYYDLPQYRPFWKEVEKLDVPFYLHPRNPLPQDSRIYDGHPWLLGPTWAFAQETAVHALRLMASGLFDEHPRLNIILGHLGEGLPYMMYRIDHRIAWVKAPPDYPAKRRFMDYFLENFHITTSGNFRTQTLIDAILEIGADRILFSTDWPFENIDHAADWFAATSIAEADRVKIGRTNARRLFKLDVR

SEQ ID NO: 574 - protein, 328 aa, Artificial Sequence
  synthetic construct; Dicamba decarboxylase variant
MAQGLVALEEHFAIPETLQDAAGFVPGDYWKELQHRLLDIQDTRLKEMDKHGIGTMILSLAAPAVQAIPDRRKAIEIARRANDFLAEEVAKRPDRFLAFAALPLQDVDAATEELQRCVADLGFVGAMVNGFSQEGDGQTPLYYDLPQYRPFWKEVEKLDVPFYLHPRNPLPQDSRIYDGHPWLLGPTWAFAQETAVHALRLMASGLFDEHPRLNIILGHLGEGLPYMMYRIDHRIAWVKAPPDYPAKRRFMDYFLENFHITTSGNFRTQTLIDAILEIGADRILFSTDWPFENIDHAADWFNATSIAEADRVKIGRTNARRLFKLDGS

SEQ ID NO: 575 - protein, 328 aa, Artificial Sequence
  synthetic construct; Dicamba decarboxylase variant
MAQGLVALEEHFAIPETLQDAAGFVPGDYWKELQHRLLDIQDTRLKEMDKHGIGTMILSLAAPAVQAIPDRRKAIELARRANDFLAEEVAKRPDRFLAFAALPLQDVDAATSELQRCVADLGFVGAMVNGFSQEGDGQTPLYYDLPQYRPFWKEVEKLDVPFYLHPRNPLPQDARIYDGHPWLLGPTWAFAQETAVHALRLMASGLFDEHPRLNIILGHLGEGLPYMMYRIDHRIAWVHATPRYPAKRRFMDYFLENFHITTSGNFRTQTLIDAILEIGADRILFSTDWPFENIDHAADWFNATSIAEADRVKIGRTNARRLFKLDVR

SEQ ID NO: 576 - protein, 328 aa, Artificial Sequence
  synthetic construct; Dicamba decarboxylase variant
MAQGLVALEEHFAIPETLQDAAGFVPGDYWKELQHRLLDIQDTRLKEMDKHGIGTMVLSLAAPAVQAIPDRRKAIEIARRANDFLAEEVAKRPDRFLAFAALPLQDVDAATEELQRCVADLGFVGAMVNGFSQEGDGQTPLYYDLPQYRPFWGEVEKLDVPFYLHPRNPLPQDARIYDGHPWLLGPTWAFAQETAVHALRLMASGLFDEHPRLNIILGHLGEGLPYMMYRIDHRIAWVEAPPDYPAKRRFMDYFLENFHITTSGNFRTQTLIDAILEIGADRILFSTDWPFENIDHAADWFAATSIAEADRVKIGRTNARRLFKLDGR

SEQ ID NO: 577 - protein, 328 aa, Artificial Sequence
  synthetic construct; Dicamba decarboxylase variant
MAQGLVALEEHFAIPETLNDAAGFVPGDYWKELQHRLLDIQDERLKEMDKHGIGTMILSLAAPAVQAIPDRRKAIEIAKRANDFLAEEVAKRPDRFLAFAALPLQDVDAATEELQRCVADLGFVGAMVNGFSQEGDGQTPLYYDLPQYRPFWKEVEKLDVPFYLHPRNPLPQDSRIYDGHPWLLGPTWAFAQETAVHALRLMASGLFDEHPRLNIILGHMGEGLPYMMYRIDHRIAWVKAPPRYPAKRRFMDYFLENFWITTSGNFRTQTLIDAILEIGADRILFSTDWPFENIDHAADWFAATSIAEADRVKIGRTNARRLFKLDVS

SEQ ID NO: 578 - protein, 328 aa, Artificial Sequence
  synthetic construct; Dicamba decarboxylase variant
MAQGLVALEEHFAIPETLQDAAGFVPGDYWKELQHRLLDMQDERLKEMDRHGIGTMVLSLAAPAVQAIPDRRKAIEIARRANDFLAEEVAKRPDRFLAFAALPLQDVDAATEELQRCVNDLGFVGAMVNGFSQEGDGQTPLYYDLPQYRPFWGEVEKLDVPFYLHPRNPLPQDSRIYDGHPWLLGPTWAFAQETAVHALRLMASGLFDEHPRLNIILGHLGEGLPYMMYRIDHRIAWVKAPPDYPAKRRFMDYFLENFWITTSGNFRTQTLIDAILEIGADRILFSTDWPFENIDHAADWFAATSIAEADRVKIGRTNARNLFKLDGR

SEQ ID NO: 579 - protein, 328 aa, Artificial Sequence
  synthetic construct; Dicamba decarboxylase variant
MAQGLVALEEHFAIPETLNDAAGFVPGDYWKELQHRLLDIQDTRLKEMDKHEIGTMVLSLAAPAVQAIPDRRQAIELAKRANDFLAEEVAKRPDRFLAFAALPLQDVEAATEELQRCVADLGFVGAMVNGFSQEGDGQTPLYYDLPQYRPFWKEVEKLDVPFYLHPRNPLPQDSRIYDGHPWLLGPTWAFAQETAVHALRLMASGLFDEHPRLNIILGHMGEGLPYMMYRIDHRIAWVKAPPDYPAKRRFMDYFLENFHITTSGNFRTQTLIDAILEIGADRILFSTDWPFENIDHAADWFNATSIAEADRVKIGRTNARRLFKLDGS

SEQ ID NO: 580 - protein, 328 aa, Artificial Sequence
  synthetic construct; Dicamba decarboxylase variant
MAQGLVALEEHFAIPETLNDAAGFVPGDYWKELQHRLLDIQDTRLKEMDKHEIGTMVLSLAAPAVQAIPDRRQAIELARRANDFLAEEVAKRPDRFLAFAALPLQDPDAATEELQRCVADLGFVGAMVNGFSQEGDGQTPLYYDLPQYRPFWGEVEKLDVPFYLHPRNPLPQDARIYDGHPWLLGPTWAFAQETAVHALRLMASGLFDEHPRLNIILGHMGEGLPYMMYRIDHRIAWVKAPPRYPAKRRFMDYFLENFHITTSGNFRTQTLIDAILEIGADRILFSTDWPFENIDHAADWFAATSIAEADRVKIGRTNARRLFKLDGR

SEQ ID NO: 581 - protein, 328 aa, Artificial Sequence
  synthetic construct; Dicamba decarboxylase variant
MAQGLVALEEHFAIPETLQDAAGFVPGDYWKELQHRLLDIQDTRLKEMDKHEIGTMVLSLAAPAVQAIPDRRKAIELAKRANDFLAEEVAKRPDRFLAFAALPLQDVDAATSELQRCVADLGFVGAMVNGFSQEGDGQTPLYYDLPQYRPFWKEVEKLDVPFYLHPRNPLPQDARIYDGHPWLLGPTWAFAQETAVHALRLMASGLFDEHPRLNIILGHMGEGLPYMMYRIDHRIAWVKAPPDYPAKRRFMDYFLENFHITTSGNFRTQTLIDAILEIGADRILFSTDWPFENIDHAADWFAATSIAEADRVKIGRTNARRLFKLDGS

SEQ ID NO: 582 - protein, 328 aa, Artificial Sequence
  synthetic construct; Dicamba decarboxylase variant
MAQGLVALEEHFAIPETLNDAAGFVPGDYWKELQHRLMDIQDTRLKEMDKHEIGTMVLSLAAPAVQAIPDRRKAIEIARRANDFLAEEVAKRPDRFLAFAALPLQDPDAATEELQRCVNDLGFVGAMVNGFSQEGDGQTPLYYDLPQYRPFWGEVEKLDVPFYLHPRNPLPQDARIYDGHPWLLGPTWAFAQETAVHALRLMASGLFDEHPRLNIILGHMGEGLPYMMYRIDHRIAWVKAPPDYPAKRRFMDYFLENFHITTSGNFRTQTLIDAILEIGADRILFSTDWPFENIDHAADWFNATSIAEADRVKIGRTNARRLFKLDGS

SEQ ID NO: 583 - protein, 328 aa, Artificial Sequence
  synthetic construct; Dicamba decarboxylase variant
MAQGKVALEEHFAIPETLQDAAGFVPGDYWKELQHRLLDIQDTRLKEMDKHEIGTMILSLAAPAVQGIPDRRKAIELAKRANDFLAEEVAKRPDRFLAFAALPLQDPEAATEELQRCVNDLGFVGAMVNGFSQEGDGQTPLYYDLPQYRPFWKEVEKLDVPFYLHPRNPLPQDSRIYDGHPWLLGPTWAFAQETAVHALRLMASGLFDEHPRLNIILGHLGEGLPYMMYRIDHRIAWVKAPPRYPAKRRFMDYFLENFWITTSGNFRTQTLIDAILEIGADRILFSTDWPFENIDHAADWFAATSIAEADRVKIGRTNARRLFKLDVR

SEQ ID NO: 584 - protein, 328 aa, Artificial Sequence
  synthetic construct; Dicamba decarboxylase variant
MAQGKVALEEHFAIPETLNDAAGFVPGDYWKELQHRLLDIQDTRLKEMDKHGIGTMILSLAAPAVQGIVDRRQAIEIAKRANDFLAEEVAKRPDRFLAFAALPLQDPDAATSELQRCVADLGFVGAMVNGFSQEGDGQTPLYYDLPQYRPFWKEVEKLDVPFYLHPRNPLPQDARIYDGHPWLLGPTWAFAQETAVHALRLMASGLFDEHPRLNIILGHMGEGLPYMMYRIDHRIAWVKAPPDYPAKRRFMDYFLENFHITTSGNFRTQTLIDAILEIGADRILFSTDWPFENIDHAADWFAATSIAEADRVKIGRTNARRLFKLDVR

SEQ ID NO: 585 - protein, 328 aa, Artificial Sequence
  synthetic construct; Dicamba decarboxylase variant
MAQGKVALEEHFAIPETLQDAAGFVPGDYWKELQHRLMDIQDTRLKEMDKHEIGTMVLSLAAPAVQAIPDRRKAIELAKRANDFLAEEVAKRPDRFLAFAALPMQDPEAATEELQRCVADLGFVGAMVNGFSQEGDGQTPLYYDLPQYRPFWGEVEKLDVPFYLHPRNPLPQDARIYDGHPWLLGPTWAFAQETAVHALRLMASGLFDEHPRLNIILGHMGEGLPYMMYRIDHRIAWVKAPPDYPAKRRFMDYFLENFWITTSGNFRTQTLIDAILEIGADRILFSTDWPFENIDHAADWFAATSIAEADRVKIGRTNARNLFKLDVS

SEQ ID NO: 586 - protein, 328 aa, Artificial Sequence
  synthetic construct; Dicamba decarboxylase variant
MAQGLVALEEHFAIPETLQDAAGFVPGDYWKELQHRLLDIQDTRLKEMDKHEIGTMVLSLAAPAVQAIPDRRKAIELARRANDFLAEEVAKRPDRFLAFAALPLQDVDAATEELQRCVNDLGFVGAMVNGFSQEGDGQTPLYYDLPQYRPFWKEVEKLDVPFYLHPRNPLPQDSRIYDGHPWLLGPTWAFAQETAVHALRLMASGLFDEHPRLNIILGHLGEGLPYMMYRIDHRIAWVHAPPDYPAKRRFMDYFLENFHITTSGNFRTQTLIDAILEIGADRILFSTDWPFENIDHAADWFNATSIAEADRVKIGRTNARRLFKLDVR

SEQ ID NO: 587 - DNA, 984 bp, Artificial Sequence
  synthetic construct; Dicamba decarboxylase variant
atggctcaaggcaaagtggcactggaagaacatttcgcaatcccggaaacgctgcaagactcggcaggcttcgtcccgggcgactactggaaagaactgcagcatcgtctgctggatatccaagacacccgcctgaaactgatggatgcgcacggcatcgaaacgatgattctgtccctggctgcaccggctgttcaggcgattccggaccgtcgcaaagccattgaaatcgcacgtcgcgctaatgatttcctggcagaagaatgcgctaaacgtccggaccgctttctggcattcgcagcactgccgctgcaggatccggacgcagctaccgaagaactgcaacgttgtgtcaacgatctgggcttcgtgggtgccctggttaatggctttagccaggaaggcgatggtcaaaccccgctgtattacgacctgccgcagtatcgcccgttctggggtgaagtcgaaaaactggatgtgccgttttatctgcatccgcgtaacccgctgccgcaggattcccgtatctacgacggtcacccgtggctgctgggtccgacctgggcgttcgcccaagaaacggcggtgcatgccctgcgtctgatggcatctggcctgtttgatgaacacccgcgtctgaatattatcctgggtcatatgggcgaaggtctgccgtacatgatgtaccgtatcgatcatcgtatcgcatgggttaaactgccgccgcgttatccggcaaaacgtcgctttatggactacttcaacgaaaattttcacattaccacgtcaggcaacttccgtacccagacgctgattgatgcaatcctggaaattggtgctgatcgcatcctgttctcgaccgactggccgtttgaaaacattgatcatgccgctgactggtttaatgctacgtctattgccgaagctgaccgtgtcaaaatcggccgcaccaatgcccgtcgtctgttcaaactggatggcgct

SEQ ID NO: 588 - DNA, 984 bp, Artificial Sequence
  synthetic construct; Dicamba decarboxylase variant
atggctcaaggcaaagtggcactggaagaacatttcgcaatcccggaaacgctgcaagactcggcaggcttcgtcccgggcgactactggaaagaactgcagcatcgtctgctggatatccaagacacccgcctgaaactgatggatgcgcacggcatcgaaacgatgattctgtccctggctgcaccggctgttcaggcgattccggaccgtcgcaaagccattgaaatcgcacgtcgcgctaatgatatgctggcagaagaatgcgctaaacgtccggaccgctttctggcattcgcagcactgccgctgcaggatccggacgcagctaccgaagaactgcaacgttgtgtcaacgatctgggcttcgtgggtgccctggttaatggctttagccaggaaggcgatggtcaaaccccgctgtattacgacctgccgcagtatcgcccgttctggggtgaagtcgaaaaactggatgtgccgttttatctgcatccgcgtaacccgctgccgcaggattcccgtatctacgacggtcacccgtggctgctgggtccgacctgggcgttcgcccaagaaacggcggtgcatgccctgcgtctgatggcatctggcctgtttgatgaacacccgcgtctgaatattatcctgggtcatctgggcgaaggtctgccgtacatgatgtaccgtatcgatcatcgtatcgcatgggttcacgagccgccgcgttatccggcaaaacgtcgccttatggactacttcaacgaaaattttcacattaccacgtcaggcaacttccgtacccagacgctgattgatgcaatcctggaaattggtgctgatcgcatcctgttctcgaccgactggccgtttgaaaacattgatcatgccgctgactggtttaatgctacgtctattgccgaagctgaccgtgtcaaaatcggccgcaccaatgcccgtcgtctgttcaaactggatggcgct

SEQ ID NO: 589 - DNA, 984 bp, Artificial Sequence
  synthetic construct; Dicamba decarboxylase variant
atggctcaaggcaaagtggcactggaagaacatttcgcaatcccggaaacgctgcaagactcggcaggcttcgtcccgggcgactactggaaagaactgcagcatcgtctgctggatatccaagacacccgcctgcgcctgatggatgcgcacggcatcgaaacgatgattctgtccctggctgcaccggctgttcaggcgattccggaccgtcgcaaagccattgaaatcgcacgtcgcgctaatgatttcctggcagaagaatgcgctaaacgtccggaccgctttctggcattcgcagcactgccgctgcaggatccggacgcagctaccgaagaactgcaacgttgtgtcaacgatctgggcttcgtgggtgccctggttaatggctttagcgtggaaggcgatggtcaaaccccgctgtattacgacctgccgcagtatcgcccgttctggggtgaagtcgaaaaactggatgtgccgttttatctgcatccgcgtaacccgctgccgcaggattcccgtatctacgacggtcacccgtggctgctgggtccgacctgggcgttcgcccaagaaacggcggtgcatgccctgcgtctgatggcatctggcctgtttgatgaacacccgcgtctgaatattatcctgggtcatctgggcgaaggtctgccgtacatgatgtaccgtatcgatcatcgtatcgcatgggttaaactgccgccgcgttatccggcaaaacgtcgctttatggactacttcctggaaaattttcacattaccacgtcaggcaacttccgtacccagacgctgattgatgcaatcctggaaattggtgctgatcgcatcctgttctcgaccgactggccgtttgaaaacattgatcatgccgctgactggtttaatgctacgtctattgccgaagctgaccgtgtcaaaatcggccgcaccaatgcccgtcgtctgttcaaactggatggtgac

SEQ ID NO: 590 - DNA, 984 bp, Artificial Sequence
  synthetic construct; Dicamba decarboxylase variant
atggctcaaggcaaagtggcactggaagaacatttcgcaatcccggaaacgctgcaagactcggcaggcttcgtcccgggcgactactggaaagaattgcagcatcgtctgctggatatccaagacacccgcctgaaactgatggatgcgcacggcatcgaaacgatgattctgtccctggctgcaccggctgttcaggcgattccggaccgtcgcaaagccattgaaatcgcacgtcgcgctaatgatttcctggcagaagaatgcgctaaacgtccggaccgctttctggcattcgcagcactgccgctgcaggatccggacgcagctaccgaagaactgcaacgttgcgtcaacactctgggcttcgtgggtgccctggttaatggctttagcgtggaaggcgatggtcaaaccccgctgtattacgacctgccgcagtatcgcccgttctggggtgaagtcgaaaaactggatgtgccgttttatctgcatccgcgtaacccgctgccgcaggattcccgtatctacgacggtcacccgtggctactgggtccgacctgggcgttcgcccaagaaacggcggtgcatgccctgcgtctgatggcatctggcctgtttgatgaacacccgcgtctgaatattatcctgggtcatctgggcgaaggtctgccgtacatgatgtaccgtatcgatcatcgtatcgcatgggttcacgagccgccgcgttatccggcaaaacgtcgctttatggactacttcaacgaaaattttcacattaccacgtcaggcaacttccgtacccagacgctgattgatgcaatcctggaaattggtgctgatcgcatcctgttctcgaccgactggccgtttgaaaacattgatcatgccgctgactggtttaatgctacgtctattgccgaagctgaccgtgtcaaaatcggccgcaccaatgcccgtcgtctgttcaaactggatggcgct

SEQ ID NO: 591 - DNA, 984 bp, Artificial Sequence
  synthetic construct; Dicamba decarboxylase variant
atggctcaaggcaaagtggcactggaagaacatttcgcaatcccggaaacgctgcaagactcggcaggcttcgtcccgggcgactactggaaagaactgcagcatcgtctgctggatatccaagacacccgcctgaaactgatggatgcgcacggcatcgaaacgatgattctgtccctggctgcaccggctgttcaggcgattccggaccgtcgcaaagccattgaaatcgcacgtcgcgctaatgatttcctggcagaagaatgcgctaaacgtccggaccgctttctggcattcgcagcactgccgctgcaggatccggacgcagctaccgaagaactgcaacgttgtgtcaacactctgggcttcgtgggtgccctggttaatggctttagccaggaaggcgatggtcaaaccccgctgtattacgacctgccgcagtatcgcccgttctggggtgaagtcgaaaaactggatgtgccgttttatctgcatccgcgtaacccgctgccgcaggattcccgtatctacgacggtcacccgtggctgctgggtccgacctgggcgttcgcccaagaaacggcggtgcatgccctgcgtctgatggcatctggcctgtttgatgaacacccgcgtctgaatattatcctgggtcatatgggcgaaggtctgccgtacatgatgtaccgtatcgatcatcgtatcgcatgggttcacgagccgccgcgttatccggcaaaacgtcgctttatggactacttcaacgaaaattttcacattaccacgtcaggcaacttccgtacccagacgctgattgatgcaatcctggaaattggtgctgatcgcatcctgttctcgaccgactggccgtttgaaaacattgatcatgccgctgactggtttaatgctacgtctattgccgaagctgaccgtctgaaaatcggccgcaccaatgcccgtcgtctgttcaaactggatggcgct

SEQ ID NO: 592 - DNA, 984 bp, Artificial Sequence
  synthetic construct; Dicamba decarboxylase variant
atggctcaaggcaaagtggcactggaagaacatttcgcaatcccggaaacgctgcaagactcggcaggcttcgtcccgggcgactactggaaagaactgcagcatcgtctgctggatatccaagacacccgcctgaaactgatggatgcgcacggcatcgaaacgatgattctgtccctggctgcaccggctgttcaggcgattccggaccgtcgcaaagccattgaaatcgcacgtcgcgctaatgatttcctggcagaagaatgcgctaaacgtccggaccgctttctggcattcgcagcactgccgctgcaggatccggacgcagctaccgaagaactgcaacgttgtgtcaacgatctgggcttcgtgggtgccctggttaatggctttagccaggaaggcgatggtcaaaccccgctgtattacgacctgccgcagtatcgcccgttctggggtgaagtcgaaaaactggatgtgccgttttatctgcatccgcgtaacccgctgccgcaggattcccgtatctacgacggtcacccgtggctgctgggtccgacctgggcgttcgcccaagaaacggcggtgcatgccctgcgtctgatggcatctggcctgtttgatgaacacccgcgtctgaatattatcctgggtcatatgggcgaaggtctgccgtacatgatgtaccgtatcgatcatcgtatcgcatgggttcacgagccgccgcgttatccggcaaaacgtcgctttatggactacttcaacgaaaattttcacattaccacgtcaggcaacttccgtacccagacgctgattgatgcaatcctggaaattggtgctgatcgcatcctgttctcgaccgactggccgtttgaaaacattgatcatgccgctgactggtttaatgctacgtctattgccgaagctgaccgtctgaaaatcggccgcaccaatgcccgtcgtctgttcaaactggatctggac

SEQ ID NO: 593 - DNA, 984 bp, Artificial Sequence
  synthetic construct; Dicamba decarboxylase variant
atggctcaaggcaaagtggcactggaagaacatttcgcaatcccggaaacgctgcaagactcggcaggcttcgtcccgggcgactactggaaagaactgcagcatcgtctgctggatatccaagacacccgcctgaaactgatggatgcgcacggcatcgaaacgatgattctgtccctggctgcaccggctgttcaggcgattccggaccgtcgcaaagccattgaaatcgcacgtcgcgctaatgatttcctggcagaagagtgcgctaaacgtccggaccgctttctggcattcgcagcactgccgctgcaggatccggacgcagctaccgaagaactgcaacgttgcgtcaacgatctgggcttcgtgggtgccctggttaatggctttagccaggaaggcgatggtcaaaccccgctgtattacgacctgccgcagtatcgcccgttctggggtgaagtcgaaaaactggatgtgccgttttatctgcatccgcgtaacccgctgccgcaggattcccgtatctacgacggtcacccgtggctgctgggtccgacctgggcgttcgcccaagaaacggcggtgcatgccctgcgtctgatggcatctggcctgtttgatgaacacccgcgtctgaatattatcctgggtcatatgggcgaaggtctgccgtacatgatgtaccgtatcgatcatcgtatcgcatgggttaaactgccgccgcgttatccggcaaaacgtcgctttatggactacttcaacgaaaattttcacattaccacgtcaggcaacttccgtacccagacgctgattgatgcaatcctggaaattggtgctgatcgcatcctgttctcgaccgactggccgtttgaaaacattgatcatgccgctgactggtttaatgctacgtctattgccgaagctgaccgtctgaaaatcggccgcaccaatgcccgtcgtctgttcaaactggatggtgac

SEQ ID NO: 594 - DNA, 984 bp, Artificial Sequence
  synthetic construct; Dicamba decarboxylase variant
atggctcaaggcaaagtggcactggaagaacatttcgcaatcccggagacgctgcaggactcggcaggcttcgtcccgggcgactactggaaagaactgcagcatcgtctgctggatatccaagacacccgcctgaaactgatggatgcgcacggcatcgaaacgatgattctgtccctggctgcaccggctgttcaggcgattccggaccgtcgcaaagccattgaaatcgcacgtcgcgctaatgatttcctggcagaagaatgcgctaaacgtccggaccgctttctggcattcgcagcactgccgctgcaggatccggacgcagctaccgaagaactgcaacgttgtgtcaacgatctgggcttcgtgggtgccctggttaatggctttagccaggaaggcgatggtcaaaccccgctgtattacgacctgccgcagtatcgcccgttctggggtgaagtcgaaaaactggatgtgccgttttatctgcatccgcgtaacccgctgccgcaggattcccgtatctacgacggtcacccgtggctgctgggtccgacctgggcgttcgcccaagaaacggcggtgcatgccctgcgtctgatggcatctggcctgtttgatgaacacccgcgtctgaatattatcctgggtcatctgggcgaaggtctgccgtacatgatgtaccgtatcgatcatcgtatcgcatgggttcacgagccgccgcgttatccggcaaaacgtcgctttatggactacttcaacgaaaattttcacattaccacgtcaggcaacttccgtacccagacgctgattgatgcaatcctggaaattggtgctgatcgcatcctgttctcgaccgactggccgtttgaaaacattgatcatgccgctgactggtttaatgctacgtctattgccgaagctgaccgtgtcaaaatcggccgcaccaatgcccgtcgtctgttcaaactggatggcgct

SEQ ID NO: 595 - DNA, 984 bp, Artificial Sequence
  synthetic construct; Dicamba decarboxylase variant
atggctcaaggcaaagtggcactggaagaacatttcgcaatcccggaaacgctgaacgactcggcaggcttcgtcccgggcgactactggaaagaactgcagcatcgtctgctggatatccaagacacccgcctgaaactgatggatgcgcacggcatcgaaacgatgattctgtccctggctgcaccggctgttcaggcgattccggaccgtcgcaaagccattgaaatcgcacgtcgcgctaatgatatgctggcagaagaatgcgctaaacgtccggaccgctttctggcattcgcagcactgccgctgcaggatccggacgcagctaccgaagaactgcaacgttgtgtcaacgatctgggcttcgtgggtgccctggttaatggctttagccaggaaggcgatggtcaaaccccgctgtattacgacctgccgcagtatcgcccgttctggggtgaagtcgaaaaactggatgtgccgttttatctgcatccgcgtaacccgctgccgcaggattcccgtatctacgacggtcacccgtggctgctgggtccgacctgggcgttcgcccaagaaacggcggtgcatgccctgcgtctgatggcatctggcctgtttgatgaacacccgcgtctgaatattatcctgggtcatatgggcgaaggtctgccgtacatgatgtaccgtatcgatcatcgtatcgcatgggttcacgagccgccgcgttatccggcaaaacgtcgctttatggactacttcaacgaaaattttcacattaccacgtcaggcaacttccgtacccagacgctgattgatgcaatcctggaaattggtgctgatcgcatcctgttctcgaccgactggccgtttgaaaacattgatcatgccgctgactggtttaatgctacgtctattgccgaagctgaccgtgtcaaaatcggccgcaccaatgcccgtcgtctgttcaaactggatctggac

SEQ ID NO: 596 - DNA, 984 bp, Artificial Sequence
  synthetic construct; Dicamba decarboxylase variant
atggctcaaggcaaagtggcactggaagaacatttcgcaatcccggaaacgctgcaagactcggcaggcttcgtcccgggcgactactggaaagaactgcagcatcgtctgctggatatccaagacacccgcctgaaactgatggatgcgcacggcatcgaaacgatgattctgtccctggctgcaccggctgttcaggcgattccggaccgtcgcaaagccattgaaatcgcacgtcgcgctaatgatttcctggcagaagaatgcgctaaacgtccggaccgctttctggcattcgcagcactgccgctgcaggatccggacgcagctaccgaagaactgcaacgtaccgtcaacgacctgggcttcgtgggtgccctggttaatggctttagccaggaaggcgatggtcaaaccccgctgtattacgacctgccgcagtatcgcccgttctggggtgaagtcgaaaaactggatgtgccgttttatctgcatccgcgtaacccgctgccgcaggattcccgtatctacgacggtcacccgtggctgctgggtccgacctgggcgttcgcccaagaaacggcggtgcatgccctgcgtctgatggcatctggcctgtttgatgaacacccgcgtctgaatattatcctgggtcatctgggcgaaggtctgccgtacatgatgtaccgtatcgatcatcgtatcgcatgggttcacgagccgccgcgttatccggcaaaacgtcgctttatggactacttcaacgaaaattttcacattaccacgtcaggcaacttccgtacccagacgctgattgatgcaatcctggaaattggtgctgatcgcatcctgttctcgaccgactggccgtttgaaaacattgatcatgccgctgactggtttaatgctacgtctattgccgaagctgaccgtgtcaaaatcggccgcaccaatgcccgtcgtctgttcaaactggatctggac

SEQ ID NO: 597 - DNA, 984 bp, Artificial Sequence
  synthetic construct; Dicamba decarboxylase variant
atggctcagggcaaagtggcactggaagaacatttcgcaatcccggaaacgctgcaagactcggcaggcttcgtcccgtctgaatacctgaaagaactgcagcatcgtctgctggatatccaagacacccgcctgaaactgatggatgcgcacggcatcgaaacgatgattctgtccctggctgcaccggctgttcaggcgattccggaccgtcgcaaagccattgaaatcgcacgtcgcgctaatgatttcctggcagaagaatgcgctaaacgtccggaccgctttctggcattcgcagcactgccgatgcaggatgtggacgcagctaccgaagaactgcaacgttgtgtcaacgatctgggcttcgtgggtgccctggttaatggctttagcgtggaaggcgatggtcaaaccccgctgtattacgacctgccgcagtatcgcccgttctggggtgaagtcgaaaaactggatgtgccgttttatctgcatccgcgtaacccgctgccgcaggattcccgtatctacgacggtcacccgtggctgctgggtccgacctgggcgttcgcccaagaaacggcggtgcatgccctgcgtctgatggcatctggcctgtttgatgaacacccgcgtctgaatattatcctgggtcatatgggcgaaggtctgccgtacatgatgtaccgtatcgatcatcgtatcgcatgggttcacgagccgccgcgttatccggcaaaacgtcgctttatggactacttcaacgaaaattttcacattaccacgtcaggcaacttccgtacccagacgctgattgatgcaatcctggaaattggtgctgatcgcatcctgttctcgaccgactggccgtttgaaaacattgatcatgccgctgactggtttaatgctacgtctattgccgaagctgaccgtgtcaaaatcggccgcaccaatgcccgtcgtctgttcaaactggatggtgac

SEQ ID NO: 598 - DNA, 984 bp, Artificial Sequence
  synthetic construct; Dicamba decarboxylase variant
atggctcaaggcaaagtggcactggaagaacatttcgcaatcccggaaacgctgcaagactcggcaggcttcgtcccgggcgactactggaaagaactgcagcatcgtctgctggatatccaagacacccgcctgcgcctgatggatgcgcacggcatcgagacgatgattctgtccctggctgcaccggctgttcaggcgattccggaccgtcgcaaagccattgaaatcgcacgtcgcgctaatgatttcctggcagaagaatgcgctaaacgtccggaccgctttctggcattcgcagcactgccgctgcaggatccggacgcagctagcgaagaactgcaacgttgtgtcaacgatctgggcttcgtgggtgccctggttaatggctttagccaggaaggcgatggtcaaaccccgctgtattacgacctgccgcagtatcgcccgttctggggtgaagtcgaaaaactggatgtgccgttttatctgcatccgcgtaacccgctgccgcaggattcccgtatctacgacggtcacccgtggctgctgggtccgacctgggcgttcgcccaagaaacggcggtgcatgccctgcgtctgatggcatctggcctgtttgatgaacacccgcgtctgaatattatcctgggtcatatgggcgaaggtctgccgtacatgatgtaccgtatcgatcatcgtatcgcatgggttcacgagccgccgcgttatccggcaaaacgtcgctttatggactacttcaacgaaaattttcacattaccacgtcaggcaacttccgtacccagacgctgattgatgcaatcctggaaattggtgctgatcgcatcctgttctcgaccgactggccgtttgaaaacattgatcatgccgctgactggtttaatgctacgtctattgccgaagctgaccgtctgaaaatcggccgcaccaatgcccgtcgtctgttcaaactggatggtgac

SEQ ID NO: 599 - DNA, 984 bp, Artificial Sequence
  synthetic construct; Dicamba decarboxylase variant
atggctcaaggcaaagtggcactggaagaacatttcgcaatcccggaaacgctgcaagactcggcaggcttcgtcccgggcgactactggaaagaactgcagcatcgtctgctggatatccaagacacccgcctgaaactgatggatgcgcacggcatcgaaacgatgattctgtccctggctgcaccggctgttcaggcgattccggaccgtcgcaaagccattgaaatcgcacgtcgcgctaatgatttcctggcagaagaatgcgctaaacgtccggaccgctttctggcattcgcagcactgccgctgcaggatccggacgcagctaccgaagaactgcaacgttgcgtcaacgatctgggcttcgtgggtgccctggttaatggctttagcgtggaaggcgatggtcaaaccccgctgtattacgacctgccgcagtatcgcccgttctggggtgaagtcgaaaaactggatgtgccgttttatctgcatccgcgtaacccgctgccgcaggattcccgtatctacgacggtcacccgtggctgctgggtccgacctgggcgttcgcccaagaaacggcggtgcatgccctgcgtctgatggcatctggcctgtttgatgaacacccgcgtctgaatattatcctgggtcatatgggcgaaggtctgccgtacatgatgtaccgtatcgatcatcgtatcgcatgggttaaactgccgccgcgttatccggcaaaacgtcgctttatggactacttcaacgaaaattttcacattaccacgtcaggcaacttccgtacccagacgctgattgatgcaatcctggaaattggtgctgatcgcatcctgttctcgaccgactggccgtttgaaaacattgatcatgccactgactggtttaatgctacgtctattgccgaagctgaccgtgtcaaaatcggccgcaccaatgcccgtcgtctgttcaaactggatggggct

SEQ ID NO: 600 - DNA, 984 bp, Artificial Sequence
  synthetic construct; Dicamba decarboxylase variant
atggctcaaggcaaagtggcactggaagaacatttcgcaatcccggaaacgctgcaagactcggcaggcttcgtcccgggcgactactggaaagaactgcagcatcgtctgctggatatccaagacacccgcctgaaactgatggatgcgcacggcatcgaaacgatgattctgtccctggctgcaccggctgttcaggcgattccggaccgtcgcaaagccattgaaatcgcacgtcgcgctaatgatttcctggcagaagaatgcgctaaacgtccggaccgctttctggcattcgcagcactgccgctgcaggatccggacgcagctaccgaagaactgcaacgttgtgtcaacgatctgggcttcgtgggtgccctggttaatggctttagccaggaaggcgatggtcaaaccccgctgtattacgacctgccgcagtatcgcccgttctggggtgaagtcgaaaaactggatgtgccgttttatctgcatccgcgtaacccgctgccgcaggattcccgtatctacgacggtcacccgtggctgctgggtccgacctgggcgttcgcccaagaaacggcggtgcatgccctgcgtctgatggcatctggcctgtttgatgaacacccgcgtctgaatattatcctgggtcatatgggcgaaggtctgccgtacatgatgtaccgcatcgatcatcgtatcgcatgggttaaactgccgccgcgttatccggcaaaacgtcgctttatggactacttcaacgaaaattttcacattaccacgtcaggcaacttccgtacccagacgctgattgatgcaatcctggaaattggtgctgatcgcatcctgttctcgaccgactggccgtttgaaaacattgatcatgccgctgactggtttaatgctacgtctattgccgaagctgaccgtgtcaaaatcggccgcaccaatgcccgtcgtctgttcaaactggatggtgac

SEQ ID NO: 601 - DNA, 984 bp, Artificial Sequence
  synthetic construct; Dicamba decarboxylase variant
atggctcaaggcaaagtggcactggaagaacatttcgcaatcccggaaacgctgcaagactcggcaggcttcgtcccgggcgactactggaaagaactgcagcatcgtctgctggatatccaagacacccgcctgaaactgatggatgcgcacggcatcgagacgatgattctgtccctggctgcaccggctgttcaggcgattccggaccgtcgcaaagccattgaaatcgcacgtcgcgctaatgatttcctggcagaagaatgcgctaaacgtccggaccgctttctggcattcgcagcactgccgatgcaggatgtggacgcagctaccgaagaactgcaacgttgtgtcaacgatctgggcttcgtgggtgccctggttaatggctttagccaggaaggcgatggtcaaaccccgctgtattacgacctgccgcagtatcgcccgttctggggtgaagtcgaaaaactggatgtgccgttttatctgcatccgcgtaacccgctgccgcaggattcccgtatctacgacggtcacccgtggctgctgggtccgacctgggcgttcgcccaagaaacggcggtgcatgccctgcgtctgatggcatctggcctgtttgatgaacacccgcgtctgaatattatcctgggtcatatgggcgaaggtctgccgtacatgatgtaccgtatcgatcatcgtatcgcatgggttaaactgccgccgcgttatccggcaaaacgtcgctttatggactacttcaacgaaaattttcacattaccacgtcaggcaacttccgtacccagacgctgattgatgcaatcctggaaattggtgctgatcgcatcctgttctcgaccgactggccgtttgaaaacattgatcatgccgctgactggtttaatgctacgtctattgccgaagctgaccgtctgaaaatcggccgcaccaatgcccgtcgtctgttcaaactggatctggac

SEQ ID NO: 602 - DNA, 984 bp, Artificial Sequence
  synthetic construct; Dicamba decarboxylase variant
atggctcaaggcaaagaggcactggaagaacatttcgcaatcccggaaacgctgaacgactcggcaggcttcgtcccgggcgactactggaaagaactgcagcatcgtctgctggatatccaagacacccgcctgaaactgatggatgcgcaccaaatcgagacgatgattctgtccctggctgcagttggtgttcaggcgattccggaccgtcgcaaagccattgaaatcgcacgtcgcgctaatgatatgctggcagaagaatgcgctaaacgtccggaccgctttctggcattcgcagcactgccgctgcaggatgtggacgcagctagcgaagaactgcaacgtaccgtcaacactctgggcttcgtgggtgccctggttaatggctttagcgtggaaggcgatggtcaaaccccgctgtattacgacctgccgcagtatcgcccgttctggggtgaagtcgaaaaactggatgtgccgttttatctgcatccgcgtaacccgctgccgcaggattcccgtatctacgacggtcacccgtggctgctgggtccgacctgggcgttcgcccaagaaacggcggtgcatgccctgcgtctgatggcatctggcctgtttgatgaacacccgcgtctgaatattatcctgggtcatctgggcgaaggtctgccgtacatgatgtaccgtatcgatcatcgtatcgcatgggttaaactgccgccgcgttatccggcaaaacgtcgctttatggactacttcaacgaaaattttcacattaccacgtcaggcaacttccgtacccagacgctgattgatgcaatcctggaaattggtgctgatcgcatcctgttctcgaccgactggccgtttgaaaacattgatcatgccgctgcctggtttaatgctacgtctattgccgaagctgaccgtgtcaaaatcggccgcaccaatgcccgtcgtctgttcaaactggatggcgct

SEQ ID NO: 603 - DNA, 984 bp, Artificial Sequence
  synthetic construct; Dicamba decarboxylase variant
atggctcaaggcaaagtggcactggaagaacatttcgcaatcccggaaacgctgcaagactcggcaggcttcgtcccgtctgaatacctgaaagaactgcagcatcgtctgctggatatccaagacacccgcctgaaactgatggatgcgcacggcatcgaaacgatgattctgtccctggctgcaccggctgttcaggcgattccggaccgtcgcaaagccattgaaatcgcacgtcgcgctaatgatatgctggcagaagaatgcgctaaacgtccggaccgctttctggcattcgcagcactgccgctgcaggatccggacgcagctaccgaagaactgcaacgttgcgtcaacactctgggcttcgtgggtgccctggttaatggctttagcgtggaaggcgatggtcaaaccccgctgtattacgacctgccgcagtatcgcccgttctggggtgaagtcgaaaaactggatgtgccgttttatctgcatccgcgtaacccgctgccgcaggattcccgtatctacgacggtcacccgtggctgctgggtccgacctgggcgttcgcccaagaaacggcggtgcatgccctgcgtctgatggcatctggcctgtttgatgaacacccgcgtctgaatattatcctgggtcatctgggcgaaggtctgccgtacatgatgtaccgtatcgatcatcgtatcgcatgggttcacgagccgccgcgttatccggcaaaacgtcgctttatggactacttcaacgaaaattttcacattaccacgtcaggcaacttccgtacccagacgctgattgatgcaatcctggaaattggtgctgatcgcatcctgttctcgaccgactggccgtttgaaaacattgatcatgccgctgactggtttaatgctacgtctattgccgaagctgaccgtgtcaaaatcggccgcaccaatgcccgtcgtctgttcaaactggatggtgac

SEQ ID NO: 604 - DNA, 984 bp, Artificial Sequence
  synthetic construct; Dicamba decarboxylase variant
atggctcaaggcaaagtggcactggaagaacatttcgcaatcccggaaacgctgcaagactcggcaggcttcgtcccgggcgactactggaaagaactgcagcatcgtctgctggatatccaagacacccgcctgaaactgatggatgcgcacggcatcgaaacgatgattctgtccctggctgcaccggctgttcaggcgattccggaccgtcgcaaagccattgaaatcgcacgtcgcgctaatgatttcctggcagaagaatgcgctaaacgtccggaccgctttctggcattcgcagcactgccgctgcaggatccggacgcagctaccgaagaactgcaacgtaccgtcaacgacctgggcttcgtgggtgccctggttaatggctttagccaggaaggcgatggtcaaaccccgctgtattacgacctgccgcagtatcgcccgttctggggtgaagtcgaaaaactggatgtgccgttttatctgcatccgcgtaacccgctgccgcaggattcccgtatctacgacggtcacccgtggctgctgggtccgacctgggcgttcgcccaagaaacggcggtgcatgccctgcgtctgatggcatctggcctgtttgatgaacacccgcgtctgaatattatcctgggtcatatgggcgaaggtctgccgtacatgatgtaccgtatcgatcatcgtatcgcatgggttaaactgccgccgcgttatccggcaaaacgtcgctttatggactacttcaacgaaaattttcacattaccacgtcaggcaacttccgtacccagacgctgattgatgcaatcctggaaattggtgctgatcgcatcctgttctcgaccgactggccgtttgaaaacattgatcatgccgctgactggtttaatgctacgtctattgccgaagctgaccgtgtcaaaatcggccgcaccaatgcccgtcgtctgttcaaactggatggtgac

SEQ ID NO: 605 - DNA, 984 bp, Artificial Sequence
  synthetic construct; Dicamba decarboxylase variant
atggctcaaggcaaagtggcactggaagaacatttcgcaatcccggaaacgctgcaagactcggcaggcttcgtcccgggcgactactggaaagaactgcagcatcgtctgctggatatccaagacacccgcctgaaactgatggatgcgcacggcatcgaaacgatgattctgtccctggctgcaccggctgttcaggcgattccggaccgtcgcaaagccattgaaatcgcacgtcgcgctaatgatttcctggcagaagaatgcgctaaacgtccggaccgctttctggcattcgcagcactgccgctgcaggatccggacgcagctaccgaagaactgcaacgttgtgtcaacgatctgggcttcgtgggtgccctggttaatggctttagccaggaaggcgatggtcaaaccccgctgtattacgacctgccgcagtatcgcccgttctggggtgaagtcgaaaaactggatgtgccgttttatctgcatccgcgtaacccgctgccgcaggattcccgtatctacgacggtcacccgtggctgctgggtccgacctgggcgttcgcccaagaaacggcggtgcatgccctgcgtctgatggcatctggcctgtttgatgaacacccgcgtctgaatattatcctgggtcatatgggcgaaggtctgccgtacatgatgtaccgtatcgatcatcgtatcgcatgggttcaccagccgccgcgttatccggcaaaacgtcgctttatggactacttcaacgaaaattttcacattaccacgtcaggcaacttccgtacccagacgctgattgatgcaatcctggaaattggtgctgatcgcatcctgttctcgaccgactggccgtttgaaaacattgatcatgccgctgactggtttaatgctacgtctattgccgaagctgaccgtgtcaaaatcggccgcaccaatgcccgtcgtctgttcaaactggatggtgac

SEQ ID NO: 606 - DNA, 984 bp, Artificial Sequence
  synthetic construct; Dicamba decarboxylase variant
atggctcaaggcaaagtggcactggaagaacatttcgcaatcccggaaacgctgcaagactcggcaggcttcgtcccgggcgactactggaaagaactgcagcatcgtctgctggatatccaagacacccgcctgaaactgatggatgcgcacggcatcgaaacgatgattctgtccctggctgcaccggctgttcaggcgattccggaccgtcgcaaagccattgaaatcgcacgtcgcgctaatgatttcctggcagaagaatgcgctaaacgtccggaccgctttctggcattcgcagcactgccgctgcaggatccggacgcagctaccgaagaactgcaacgttgtgtcaacgatctgggcttcgtgggtgccctggttaatggctttagcgtggaaggcgatggtcaaaccccgctgtattacgacctgccgcagtatcgcccgttctggggtgaagtcgaaaaactggatgtgccgttttatctgcatccgcgtaacccgctgccgcaggattcccgtatctacgacggtcacccgtggctgctgggtccgacctgggcgttcgcccaagaaacggcggtgcatgccctgcgtctgatggcatctggcctgtttgatgaacacccgcgtctgaatattatcctgggtcatatgggcgaaggtctgccgtacatgatgtaccgtatcgatcatcgtatcgcatgggttaaactgccgccgcgttatccggcaaaacgtcgctttatggactacttcaacgaaaattttcacattaccacgtcaggcaacttccgtacccagacgctgattgatgcaatcctggaaattggtgctgatcgcatcctgttctcgaccgactggccgtttgaaaacattgatcatgccgctgactggtttaatgctacgtctattgccgaagctgaccgtgtcaaaatcggccgcaccaatgcccgtcgtctgttcaaactggatggcgct

SEQ ID NO: 607 - DNA, 984 bp, Artificial Sequence
  synthetic construct; Dicamba decarboxylase variant
atggctcaaggcaaagtggcactggaagaacatttcgcaatcccggagacgctgcaggactcggcaggcttcgtcccgtctgaatacctgaaagaactgcagcatcgtctgctggatatccaagacacccgcctgaaactgatggatgcgcacggcatcgaaacgatgattctgtccctggctgcaccggctgttcaggcgattccggaccgtcgcaaagccattgaaatcgcacgtcgcgctaatgatttcctggcagaagaatgcgctaaacgtccggaccgctttctggcattcgcagcactgccgctgcaggatgtggacgcagctaccgaagaactgcaacgttgtgtcaacgatctgggcttcgtgggtgccctggttaatggctttagcgtggaaggcgatggtcaaaccccgctgtattacgacctgccgcagtatcgcccgttctggggtgaagtcgaaaaactggatgtgccgttttatctgcatccgcgtaacccgctgccgcaggattcccgtatctacgacggtcacccgtggctgctgggtccgacctgggcgttcgcccaagaaacggcggtgcatgccctgcgtctgatggcatctggcctgtttgatgaacacccgcgtctgaatattatcctgggtcatctgggcgaaggtctgccgtacatgatgtaccgtatcgatcatcgtatcgcatgggttaaactgccgccgcgttatccggcaaaacgtcgctttatggactacttcaacgaaaattttcacattaccacgtcaggcaacttccgtacccagacgctgattgatgcaatcctggaaattggtgctgatcgcatcctgttctcgaccgactggccgtttgaaaacattgatcatgccgctgactggtttaatgctacgtctattgccgaagctgaccgtctgaaaatcggccgcaccaatgcccgtcgtctgttcaaactggatggtgac

SEQ ID NO: 608 - DNA, 984 bp, Artificial Sequence
  synthetic construct; Dicamba decarboxylase variant
atggctcaaggcaaagtggcactggaagaacatttcgcaatcccggaaacgctgcaagactcggcaggcttcgtcccgggcgactactggaaagaactgcagcatcgtctgctggatatccaagacacccgcctgaaactgatggatgcgcacggcatcgagacgatgattctgtccctggctgcaccggctgttcaggcgattccggaccgtcacaaagccattgaaatcgcacgtcgcgctaatgatttcctggcagaagaatgcgctaaacgtccggaccgctttctggcattcgcagcactgccgctgcaggatccggacgcagctaccgaagaactgcaacgtaccgtcaacgatctgggcttcgtgggtgccctggttaatggctttagccaggaaggcgatggtcaaaccccgctgtattacgacctgccgcagtatcgcccgttctggggtgaagtcgaaaaactggatgtgccgttttatctgcatccgcgtaacccgctgccgcaggattcccgtatctacgacggtcacccgtggctgctgggtccgacctgggcgttcgcccaagaaacggcggtgcatgccctgcgtctgatggcatctggcctgtttgatgaacacccgcgtctgaatattatcctgggtcatatgggcgaaggtctgccgtacatgatgtaccgtatcgatcatcgtatcgcatgggttcacgagccgccgcgttatccggcaaaacgtcgctttatggactacttcaacgaaaattttcacattaccacgtcaggcaacttccgtacccagacgctgattgatgcaatcctggaaattggtgctgatcgcatcctgttctcgaccgactggccgtttgaaaacattgatcatgccgctgactggtttaatgctacgtctattgccgaagctgaccgtgtcaaaatcggccgcaccaatgcccgtcgtctgttcaaactggatggtgac

SEQ ID NO: 609 - DNA, 984 bp, Artificial Sequence
  synthetic construct; Dicamba decarboxylase variant
atggctcaaggcaaagtggcactggaagaacatttcgcaatcccggaaacgctgcaagactcggcaggcttcgtcccgggcgactactggaaagaactgcagcatcgtctgctggatatccaagacacccgcctgaaactgatggatgcgcacggcatcgaaacgatgattctgtccctggctgcaccggctgttcaggcgattccggaccgtcgcaaagccatagaaatcgcacgtcgcgctaatgatttcctggcagaagaatgcgctaaacgtccggaccgctttctggcattcgcagcactgccgctgcaggatccggacgcagctaccgaagaactgcaacgttgtgtcaacgatctgggcttcgtgggtgccctggttaatggctttagcgtggaaggcgatggtcaaaccccgctgtattacgacctgccgcagtatcgcccgttctggggtgaagtcgaaaaactggatgtgccgttttatctgcatccgcgtaacccgctgccgcaggattcccgtatctacgacggtcacccgtggctgctgggtccgacctgggcgttcgcccaagaaacggcggtgcatgccctgcgcctgatggcatctggcctgtttgatgaacacccgcgtctgaatattatcctgggtcatctgggcgaaggtctgccgtacatgatgtaccgtatcgatcatcgtatcgcatgggttcacgagccgccgcgttatccggcaaaacgtcgctttatggactacttcaacgaaaattttcacattaccacgtcaggcaacttccgtacccagacgctgattgatgcaatcctggaaattggtgctgatcgcatcctgttctcgaccgactggccgtttgaaaacattgatcatgccgctgactggtttaatgctacgtctattgccgaagctgaccgtctgaaaatcggccgcaccaatgcccgtcgtctgttcaaactggatggcgct

SEQ ID NO: 610 - DNA, 984 bp, Artificial Sequence
  synthetic construct; Dicamba decarboxylase variant
atggctcaaggcaaagtggcactggaagaacatttcgcaatcccggaaacgctgcaagactcggcaggcttcgtcccgtctgattacctgaaagaactgcagcatcgtctgctggacatccaagacacccgcctgaaactgatggatgcgcacggcatcgagacgatgattctgtccctggctgcaccggctgttcaggcgattccggaccgtcgcaaagccattgaaatcgcacgtcgcgctaatgatttcctggcagaagaatgcgctaaacgtccggaccgctttctggcattcgcagcactgccgatgcaggatccagacgcagctaccgaagaactgcaacgttgtgtcaacgatctgggcttcgtgggtgccctggttaatggctttagcgtggaaggcgatggtcaaaccccgctgtattacgacctgccgcagtatcgcccgttctggggtgaagtcgaaaaactggatgtgccgttttatctgcatccgcgtaacccgctgccgcaggattcccgtatctacgacggtcacccgtggctgctgggtccgacctgggcgttcgcccaagaaacggcggtgcatgccctgcgtctgatggcatctggcctgtttgatgaacacccgcgtctgaatattatcctgggtcatctgggcgaaggtctgccgtacatgatgtaccgtatcgatcatcgtatcgcatgggttcacgagccgccgcgttatccggcaaaacgtcgctttatggactacttcaacgaaaattttcacattaccacgtcaggcaacttccgtacccagacgctgattgatgcaatcctggaaattggtgctgatcgcatcctgttctcgaccgactggccgtttgaaaacattgatcatgccgctgactggtttaatgctacgtctattgccgaagctgaccgtctgaaaatcggccgcaccaatgcccgtcgtctgttcaaactggatggcgct

SEQ ID NO: 611 - DNA, 984 bp, Artificial Sequence
  synthetic construct; Dicamba decarboxylase variant
atggctcaaggcaaagtggcactggaagaacatttcgcaatcccggaaacgctgcaagactcggcaggcttcgtcccgggcgactactggaaagaactgcagcatcgtctgctggatatccaagacacccgcctgaaactgatggatgcgcacggcatcgaaacgatgattctgtccctggctgcaccggctgttcaggcgattccggaccgtcgcaaagccattgaaatcgcacgtcgcgctaatgatttcctggcagaagaatgcgctaaacgtccggaccgctttctggcattcgcagcactgccgctgcaggatccggccgcagctaccgaagaactgcaacgttgtgtcaacgatctgggcttcgtgggtgccctggttaatggctttagcgtggaaggcgatggtcaaaccccgctgtattacgacctgccgcagtatcgcccgttctggggtgaagtcgaaaaactggatgtgccgttttatctgcatccgcgtaacccgctgccgcaggattcccgtatctacgacggtcacccgtggctgctgggtccgacctgggcgttcgcccaagaaacggcggtgcatgccctgcgtctgatggcatctggcctgtttgatgaacacccgcgtctgaatattatcctgggtcatatgggcgaaggtctgccgtacatgatgtaccgtatcgatcatcgtatcgcatgggttcacgagccgccgcgttatccggcaaaacgtcgctttatggactacttcaacgaaaattttcacattaccacgtcaggcaacttccgtacccagacgctgattgatgcaatcctggaaattggtgctgatcgcatcctgttctcgaccgactggccgtttgaaaacattgatcatgccgctgactggtttaatgctacgtctattgccgaagctgaccgtctgaaaatcggccgcaccaatgcccgtcgtctgttcaaactggatggtgac

SEQ ID NO: 612 - DNA, 984 bp, Artificial Sequence
  synthetic construct; Dicamba decarboxylase variant
atggctcaaggcaaagtggcactggaagaacatttcgcaatcccggagacgctgaacgactcggcaggcttcgtcccgggcgactactggaaagaactgcagcatcgtctgctggatatccaagacacccgcctgaaactgatggatgcgcacggcatcgagacgatgattctgtccctggctgcaccggctgttcaggcgattccggaccgtcgcaaagccattgaaatcgcacgtcgcgctaatgatttcctggcagaagaatgcgctaaacgtccggaccgctttctggcattcgcagcactgccgctgcaggatccggacgcagctaccgaagaactgcaacgttgtgtcaacgatctgggcttcgtgggtgccctggttaatggctttagccaggaaggcgatggtcaaaccccgctgtattacgacctgccgcagtatcgcccgttctggggtgaagtcgaaaaactggatgtgccgttttatctgcatccgcgtaacccgctgccgcaggattcccgtatctacgacggtcacccgtggctgctgggtccgacctgggcgttcgcccaagaaacggcggtgcatgccctgcgtctgatggcatctggcctgtttgatgaacacccgcgtctgaatattatcctgggtcatatgggcgaaggtctgccgtacatgatgtaccgtatcgatcatcgtatcgcatgggttaaactgccgccgcgttatccggcaaaacgtcgctttatggactacttcaacgaaaattttcacattaccacgtcaggcaacttccgtacccagacgctgattgatgcaatcctggaaattggtgctgatcgcatcctgttctcgaccgactggccgtttgaaaacattgatcatgccactgcctggtttaatgctacgtctattgccgaagctgaccgtgtcaaaatcggccgcaccaatgcccgtcgtctgttcaaactggatggcgct

SEQ ID NO: 613 - DNA, 984 bp, Artificial Sequence
  synthetic construct; Dicamba decarboxylase variant
atggctcaaggcaaagtggcactggaagaacatttcgcaatcccggaaacgctgcaagactcggcaggcttcgtcccgggcgactactggaaagaactgcagcatcgtctgctggacatccaagacacccgcctgaaactgatggatgcgcacggcatcgaaacgatgattctgtccctggctgcaccggctgttcaggcgattccggaccgtcgcaaagccattgaaatcgcacgtcgcgctaatgatttcctggcagaagaatgcgctaaacgtccggaccgctttctggcattcgcagcactgccgctgcaggatccggacgcagctaccgaagaactgcaacgttgtgtcaacgatctgggcttcgtgggtgccctggttaatggctttagcgtggaaggcgatggtcaaaccccgctgtattacgacctgccgcagtatcgcccgttctggggtgaagtcgaaaaactggatgtgccgttttatctgcatccgcgtaacccgctgccgcaggattcccgtatctacgacggtcacccgtggctgctgggtccgacctgggcgttcgcccaagaaacggcggtgcatgccctgcgtctgatggcatctggcctgtttgatgaacacccgcgtctgaatattatcctgggtcatctgggcgaaggtctgccgtacatgatgtaccgtatcgatcatcgtatcgcatgggttaaactgccgccgcgttatccggcaaaacgtcgctttatggactacttcaacgaaaattttcacattaccacgtcaggcaacttccgtacccagacgctgattgatgcaatcctggaaattggtgctgatcgcatcctgttctcgaccgactggccgtttgaaaacattgatcatgccgctgactggtttaatgctacgtctattgccgaagctgaccgtgtcaaaatcggccgcaccaatgcccgtcgtctgttcaaactggatggcgct

SEQ ID NO: 614 - DNA, 984 bp, Artificial Sequence
  synthetic construct; Dicamba decarboxylase variant
atggctcaaggcaaagtggcactggaagaacatttcgcaatcccggaaacgctgcaagactcggcaggcttcgtcccgggcgactactggaaagaactgcagcatcgtctgctggatatccaagacacccgcctgaaactgatggatgcgcacggcatcgagacgatgattctgtccctggctgcaccggctgttcaggcgattccggaccgtcgcaaagccattgaaatcgcacgtcgcgctaatgatttcctggcagaagaatgcgctaaacgtccggaccgctttctggcattcgcagcactgccgctgcaggatccggacgcagctaccgaagaactgcaacgttgcgtcaacactctgggcttcgtgggtgccctggttaatggctttagccaggaaggcgatggtcagaccccgctgtattacgacctgccgcagtatcgcccgttctggggtgaagtcgaaaaactggatgtgccgttttatctgcatccgcgtaacccgctgccgcaggattcccgtatctacgacggtcacccgtggctgctgggtccgacctgggcgttcgcccaagaaacggcggtgcatgccctgcgtctgatggcatctggcctgtttgatgaacacccgcgtctgaatattatcctgggtcatatgggcgaaggtctgccgtacatgatgtaccgtatcgatcatcgtatcgcatgggttaaactgccgccgcgttatccggcaaaacgtcgctttatggactacttcaacgaaaattttcacattaccacgtcaggcaacttccgtacccagacgctgattgatgcaatcctggaaattggtgctgatcgcatcctgttctcgaccgactggccgtttgaaaacattgatcatgccgctgactggtttaatgctacgtctattgccgaagctgaccgtgtcaaaatcggccgcaccaatgcccgtcgtctgttcaaactggatggtgac

SEQ ID NO: 615 - DNA, 984 bp, Artificial Sequence
  synthetic construct; Dicamba decarboxylase variant
atggctcaaggcaaagtggcactggaagaacatttcgcaatcccggaaacgctgcaagactcggcaggcttcgtcccgggcgactactggaaagaactgcagcatcgtctgctggatatccaagacacccgcctgaaactgatggatgcgcacggcatcgaaacgatgattctgtccctggctgcaccggctgttcaggcgattccggaccgtcgcaaagccattgaaatcgcacgtcgcgctaatgatttcctggcagaagaatgcgctaaacgtccggaccgctttctggcattcgcagcactgccgctgcaggatccggacgcagctaccgaagaactgcaacgttgtgtcaacgatctgggcttcgtgggtgccctggttaatggctttagcgtggaaggcgatggtcaaaccccgctgtattacgacctgccgcagtatcgcccgttctggggtgaagtcgaaaaactggatgtgccgttttatctgcatccgcgtaacccgctgccgcaggattcccgtatctacgacggtcacccgtggctgctgggtccgacctgggcgttcgcccaagaaacggcggtgcatgccctgcgtctgatggcatctggcctgtttgatgaacacccgcgtctgaatattatcctgggtcatatgggcgaaggtctgccgtacatgatgtaccgtatcgatcatcgtatcgcatgggttaaactgccgccgcgttatccggcaaaacgtcgctttatggactacttcaacgaaaattttcacattaccacgtcaggcaacttccgtacccagacgctgattgatgcaatcctggaaattggtgctgatcgcatcctgttctcgaccgactggccgtttgaaaacattgatcatgccactgcctggtttaatgctacgtctattgccgaagctgaccgtgtcaaaatcggccgcaccaatgcccgtcgtctgttcaaactggatggtgac

SEQ ID NO: 616 - DNA, 984 bp, Artificial Sequence
  synthetic construct; Dicamba decarboxylase variant
atggctcaaggcaaagtggcactggaagaacatttcgcaatcccggaaacgctgcaagactcggcaggcttcgtcccgggcgactactggaaagaactgcagcatcgtctgctggatatccaagacacccgcctgaaactgatggatgcgcacggcatcgaaacgatgattctgtccctggctgcaccggctgttcaggcgattccggaccgtcgcaaagccattgaaatcgcacgtcgcgctaatgatttcctggcagaagaatgcgctaaacgtccggaccgctttctggcattcgcagcactgccgatgcaggatgtggacgcagctaccgaagaactgcaacgttgcgtcaacactctgggcttcgtgggtgccctggttaatggctttagcgtggaaggcgatggtcaaaccccgctgtattacgacctgccgcagtatcgcccgttctggggtgaagtcgaaaaactggatgtgccgttttatctgcatccgcgtaacccgctgccgcaggattcccgtatctacgacggtcacccgtggctgctgggtccgacctgggcgttcgcccaagaaacggcggtgcatgccctgcgtctgatggcatctggcctgtttgatgaacacccgcgtctgaatattatcctgggtcatctgggcgaaggtctgccgtacatgatgtaccgtatcgatcatcgtatcgcatgggttaaactgccgccgcgttatccggcaaaacgtcgctttatggactacttcaacgaaaattttcacattaccacgtcaggcaacttccgtacccagacgctgattgatgcaatcctggaaattggtgctgatcgcatcctgttctcgaccgactggccgtttgaaaacattgatcatgccgctgactggtttaatgctacgtctattgccgaagctgaccgtgtcaaaatcggccgcaccaatgcccgtcgtctgttcaaactggatggcgct

SEQ ID NO: 617 - DNA, 984 bp, Artificial Sequence
  synthetic construct; Dicamba decarboxylase variant
atggctcagggcaaagtggcactggaagaacatttcgcaatcccggaaacgctgcaagactcggcaggcttcgtcccgtgcgaatactggaaagaactgcagcatcgtctgctggatatccaagacacccgcctgaaactgatggatgcgcacggcatcgaaacgatgattctgtccctggctgcaccggctgttcaggcgattccggaccgtcgcaaagccattgaaatcgcacgtcgcgctaatgatttcctggcagaagaatgcgctaaacgtccggaccgctttctggcattcgcagcactgccgatgcaggatccggacgcagctaccgaagaactgcaacgttgcgtcaacaatctgggcttcgtgggtgccctggttaatggctttagcgtggaaggcgatggtcaaaccccgctgtattacgacctgccgcagtatcgcccgttctggggtgaagtcgaaaaactggatgtgccgttttatctgcatccgcgtaacccgctgccgcaggattcccgtatctacgacggtcacccgtggctgctgggtccgacctgggcgttcgcccaagaaacggcggtgcatgccctgcgtctgatggcatctggcctgtttgatgaacacccgcgtctgaatattatcctgggtcatatgggcgaaggtctgccgtacatgatgtaccgtatcgatcatcgtatcgcatgggttcaagagccgccgcgttatccggcaaaacgtcgctttatggactacttcaacgaaaattttcacattaccacgtcaggcaacttccgtacccagacgctgattgatgcaatcctggaaattggtgctgatcgcatcctgttctcgaccgactggccgtttgaaaacattgatcatgccgctgactggtttaatgctacgtctattgccgaagctgaccgtgtcaaaatcggccgcaccaatgcccgtcgtctgttcaaactggatggtgat

SEQ ID NO: 618 - DNA, 984 bp, Artificial Sequence
  synthetic construct; Dicamba decarboxylase variant
atggctcaaggcaaagtggcactggaagaacatttcgcaatcccggaaacgctgcaagactcggcaggcttcgtcccgggcgactactggaaagaactgcagcatcgtctgctggatatccaagacacccgcctgaaactgatggatgcgcacggcatcgaaacgatgattctgtccctggctgcaccgggtgttcaggcgattccggaccgtcgcaaagccattgaaatcgcacgtcgcgctaatgatatcctggcagaagaatgcgctaaacgtccggaccgctttctggcattcgcagcactgccgctgcaggatccggacgcagctaccgaagaactgcaacgttgcgtcaacgatctgggcttcgtgggtgccctggttaatggctttagccaggaaggcgatggtcaaaccccgctgtattacgacctgccgcagtatcgcccgttctggggtgaagtcgaaaaactggatgtgccgttttatctgcatccgcgtaacccgctgccgcaggattcccgtatctacgacggtcacccgtggctgctgggtccgacctgggcgttcgcccaagaaacggcggtgcatgccctgcgtctgatggcatctggcctgtttgatgaacacccgcgtctgaatattatcctgggtcatctgggcgaaggtctgccgtacatgatgtaccgtatcgatcatcgtatcgcatgggttcacgagccgccgcgttatccggcaaaacgtcgctttatggactacttcaacgaaaattttcacattaccacgtcaggcaacttccgtacccagacgctgattgatgcaatcctggaaattggtgctgatcgcatcctgttctcgaccgactggccgtttgaaaacattgatcatgccgctgactggtttaatgctacgtctattgccgaagctgaccgtgtcaaaatcggccgcaccaatgcccgtcgtctgttcaaactggatggtgat

SEQ ID NO: 619 - DNA, 984 bp, Artificial Sequence
  synthetic construct; Dicamba decarboxylase variant
atggctcaaggcaaagtggcactggaagaacatttcgcaatcccggaaacgctgcaagactcggcaggcttcgtcccgggcgactactggaaagaactgcagcatcgtctgctggatatccaagacacccgcctgaaactgatggatgcgcacggcatcgaaacgatgattctgtccctggctgcaccggctgttcaggcgattccggaccgtcgcaaagccattgaaatcgcacgtcgcgctaatgatttcctggcagaagaatgcgctaaacgtccggaccgctttctggcattcgcagcactgccgctgcaggatccggacgcagctaccgaagaactgcaacgttgcgtcaacgatctgggcttcgtgggtgccctggttaatggctttagccaggaaggcgatggtcaaaccccgctgtattacgacctgccgcagtatcgcccgttctggggtgaagtcgaaaaactggatgtgccgttttatctgcatccgcgtaacccgctgccgcaggattcccgtatctacgacggtcacccgtggctgctgggtccgacctgggcgttcgcccaagaaacggcggtgcatgccctgcgtctgatggcatctggcctgtttgatgaacacccgcgtctgaatattatcctgggtcatatgggcgaaggtctgccgtacatgatgtaccgtatcgatcatcgtatcgcatgggttcacgagccgccgcgttatccggcaaaacgtcgctttatggactacttcaacgaaaattttcacattaccacgtcaggcaacttccgtacccagacgctgattgatgcaatcctggaaattggtgctgatcgcatcctgttctcgaccgactggccgtttgaaaacattgatcatgccgctgactggtttaatgctacgtctattgccgaagctgaccgtgtcaaaatcggccgcaccaatgcccatcgtctgttcaaactggatggcgct

SEQ ID NO: 620 - DNA, 984 bp, Artificial Sequence
  synthetic construct; Dicamba decarboxylase variant
atggctcaaggcaaagtggcactggaagaacatttcgcaatcccggaaacgctgcaagactcggcaggcttcgtcccgggcgactactggaaagaactgcagcatcgtctgctggatatccaagacacccgcctgaaactgatggatgcgcacggcatcgaaacgatgattctgtccctggctgcaccggctgttcaggcgattccggaccgtcgcaaagccattgaaatcgcacgtcgcgctaatgatttcctggcagaagaatgcgctaaacgtccggaccgctttctggcattcgcagcactgccgctgcaggatccggacgcagctaccgaagaactgcaacgttgcgtcaacaatctgggcttcgtgggtgccctggttaatggctttagccaggaaggcgatggtcaaaccccgctgtattacgacctgccgcagtatcgcccgttctggggtgaagtcgaaaaactggatgtgccgttttatctgcatccgcgtaacccgctgccgcaggattcccgtatctacgacggtcacccgtggctgctgggtccgacctgggcgttcgcccaagaaacggcggtgcatgccctgcgtctgatggcatctggcctgtttgatgaacacccgcgtctgaatattatcctgggtcatatgggcgaaggtctgccgtacatgatgtaccgtatcgatcatcgtatcgcatgggttcacgagccgccgcgttatccggcaaaacgtcgctttatggactacttcaacgaaaattttcacattaccacgtcaggcaacttccgtacccagacgctgattgatgcaatcctggaaattggtgctgatcgcatcctgttctcgaccgactggccgtttgaaaacattgatcatgccgctgactggtttaatgctacgtctattgccgaagctgaccgtgtcaaaatcggccgcaccaatgcccgtcgtctgttcaaactggatggcgct

SEQ ID NO: 621 - DNA, 984 bp, Artificial Sequence
  synthetic construct; Dicamba decarboxylase variant
atggctcaaggcaaagtggcactggaagaacatttcgcaatcccggaaacgctgcaagactcggcaggcttcgtcccgggcgactactggaaagaactgcagcatcgtctgctggatatccaagacacccgcctgaaactgatggatgcgcacggcatcgaaacgatgattctgtccctggctgcaccggctgttcaggcgattccggaccgtcgcaaagccattgaaatcgcacgtcgcgctaatgatatgctggcagaagaatgcgctaaacgtccggaccgctttctggcattcgcagcactgccgctgcaggatccggacgcagctaccgaagaactgcaacgttgtgtcaacgatctgggcttcgtgggtgccctggttaatggctttagcgtggaaggcgatggtcaaaccccgctgtattacgacctgccgcagtatcgcccgttctggggtgaagtcgaaaaactggatgtgccgttttatctgcatccgcgtaacccgctgccgcaggattcccgtatctacgacggtcacccgtggctgctgggtccgacctgggcgttcgcccaagaaacggcggtgcatgccctgcgtctgatggcatctggcctgtttgatgaacacccgcgtctgaatattatcctgggtcatctgggcgaaggtctgccgtacatgatgtaccgtatcgatcatcgtatcgcatgggttcacgagccgccgcgttatccggcaaaacgtcgctttatggactacttcaacgaaaattttcacattaccacgtcaggcaacttccgtacccagacgctgattgatgcaatcctggaaattggtgctgatcgcatcctgttctcgaccgactggccgtttgaaaacattgatcatgccgctgactggtttaatgctacgtctattgccgaagctgaccgtgtcaaaatcggccgcaccaatgcccgtcgtctgttcaaactggatggtgac

SEQ ID NO: 622 - DNA, 984 bp, Artificial Sequence
  synthetic construct; Dicamba decarboxylase variant
atggctcaaggcaaagtggcactggaagaacatttcgcaatcccggaaacgctgcaagactcggcaggcttcgtcccgggcgactactggaaagaactgcagcatcgtctgctggatatccaagacacccgcctgaaactgatggatgcgcacggcatcgaaacgatgattctgtccctggctgcaccggctgttcaggcgattccggaccgtcgcaaagccattgaaatcgcacgtcgcgctaatgatttcctggcagaagaatgcgctaaacgtccggaccgctttctggcattcgcagcactgccgctgcaggatccggacgcagctaccgaagaactgcaacgttgcgtcaacactctgggcttcgtgggtgccctggttaatggctttagccaggaaggcgatggtcaaaccccgctgtattacgacctgccgcagtatcgcccgttctggggtgaagtcgaaaaactggatgtgccgttttatctgcatccgcgtaacccgctgccgcaggattcccgtatctacgacggtcacccgtggctgctgggtccgacctgggcgttcgcccaagaaacggcggtgcatgccctgcgtctgatggcatccggcctgtttgatgaacacccgcgtctgaatattatcctgggtcatctgggcgaaggtctgccgtacatgatgtaccgtatcgatcatcgtatcgcatgggttcacgagccgccgcgttatccggcaaaacgtcgctttatggactacttcaacgaaaattttcacattaccacgtcaggcaacttccgtacccagacgctgattgatgcaatcctggaaattggtgctgatcgcatcctgttctcgaccgactggccgtttgaaaacattgatcatgccgctgactggtttaatgctacgtctattgccgaagctgaccgtgtcaaaatcggccgcaccaatgcccgtcgtctgttcaaactggatctggac

SEQ ID NO: 623 - DNA, 984 bp, Artificial Sequence
  synthetic construct; Dicamba decarboxylase variant
atggctcaaggcaaagtggcactggaagaacatttcgcaatcccggaaacgctgcaagactcggcaggcttcgtcccgggcgactactggaaagaactgcagcatcgtctgctggatatccaagacacccgcctgaaactgatggatgcgcaccaaatcgagacgatgattctgtccctggctgcaccggctgttcaggcgattccggaccgtcgcaaagccattgaaatcgcacgtcgcgctaatgatttcctggcagaagaatgcgctaaacgtccggaccgctttctggcattcgcagcactgccgctgcaggatccggacgcagctaccgaagaactgcaacgttgtgtcaacgatctgggcttcgtgggtgccctggttaatggctttagccaggaaggcgatggtcaaaccccgctgtattacgacctgccgcagtatcgcccgttctggggtgaagtcgaaaaactggatgtgccgttttatctgcatccgcgtaacccgctgccgcaggattcccgtatctacgacggtcacccgtggctgctgggtccgacctgggcgttcgcccaagaaacggcggtgcatgccctgcgtctgatggcatctggcctgtttgatgaacacccgcgtctgaatattatcctgggtcatatgggcgaaggtctgccgtacatgatgtaccgtatcgatcatcgtatcgcatgggttcacgagccgccgcgttatccggcaaaacgtcgctttatggactacttcaacgaaaattttcacattaccacgtcaggcaacttccgtacccagacgctgattgatgcaatcctggaaattggtgctgatcgcatcctgttctcgaccgactggccgtttgaaaacattgatcatgccgctgactggtttaatgctacgtctattgccgaagctgaccgtgtcaaaatcggccgcaccaatgcccgtcgtctgttcaaactggatggtgac

SEQ ID NO: 624 - DNA, 984 bp, Artificial Sequence
  synthetic construct; Dicamba decarboxylase variant
atggctcaaggcaaagtggcactggaagaacatttcgcaatcccggaaacgctgcaagactcggcaggcttcgtcccgggcgactactggaaagaactgcagcatcgtctgctggatatccaagacacccgcctgcgcctgatggatgcgcacggcatcgaaacgatgattctgtccctggctgcaccggctgttcaggcgattccggaccgtcgcaaagccattgaaatcgcacgtcgcgctaatgatttcctggcagaagaatgcgctaaacgtccggaccgctttctggcattcgcagcactgccgctgcaggatccagacgcagctaccgaagaactgcaacgttgtgtcaacgatctgggcttcgtgggtgccctggttaatggctttagcgtggaaggcgatggtcaaaccccgctgtattacgacctgccgcagtatcgcccgttctggggtgaagtcgaaaaactggatgtgccgttttatctgcatccgcgtaacccgctgccgcaggattcccgtatctacgacggtcacccgtggctgctgggtccgacctgggcgttcgcccaagaaacggcggtgcatgccctgcgtctgatggcatctggcctgtttgatgaacacccgcgtctgaatattatcctgggtcatatgggcgaaggtctgccgtacatgatgtaccgtatcgatcatcgtatcgcatgggttcacgagccgccgcgttatccggcaaaacgtcgctttatggactacttcaacgaaaattttcacattaccacgtcaggcaacttccgtacccagacgctgattgatgcaatcctggaaattggtgctgatcgcatcctgttctcgaccgactggccgtttgaaaacattgatcatgccgctgcctggtttaatgctacgtctattgccgaagctgaccgtgtcaaaatcggccgcaccaatgcccgtcgtctgttcaaactggatggtgct

SEQ ID NO: 625 - DNA, 984 bp, Artificial Sequence
  synthetic construct; Dicamba decarboxylase variant
atggctcaaggcaaagtggcactggaagaacatttcgcaatcccggaaacgctgcaagactcggcaggcttcgtcccgggcgactactggaaagaactgcagcatcgtctgctggatatccaagacacccgcctgaaactgatggatgcgcacggcatcgaaacgatgattctgtccctggctgcaccggctgttcaggcgattccggaccgtcgcaaagccattgaaatcgcacgtcgcgctaatgatttcctggcagaagaatgcgctaaacgtccggaccgctttctggcattcgcagcactgccgctgcaggatccggacgcagctaccgaagaactgcaacgtaccgtcaacgacctgggcttcgtgggtgccctggttaatggctttagccaggaaggcgatggtcaaaccccgctgtattacgacctgccgcagtatcgcccgttctggggtgaagtcgaaaaactggatgtgccgttttatctgcatccgcgtaacccgctgccgcaggattcccgtatctacgacggtcacccgtggctgctgggtccgacctgggcgttcgcccaagaaacggcggtgcatgccctgcgtctgatggcatctggcctgtttgatgaacacccgcgtctgaatattatcctgggtcatatgggcgaaggtctgccgtacatgatgtaccgtatcgatcatcgtatcgcatgggttcacgagccgccgcgttatccggcaaaacgtcgctttatggactacttcaacgaaaattttcacattaccacgtcaggcaacttccgtacccagacgctgattgatgcaatcctggaaattggtgctgatcgcatcctgttctcgaccgactggccgtttgaaaacattgatcatgccgctgactggtttaatgctacgtctattgccgaagctgaccgtctgaaaatcggccgcaccaatgcccgtcgtctgttcaaactggatggcgct

SEQ ID NO: 626 - DNA, 984 bp, Artificial Sequence
  synthetic construct; Dicamba decarboxylase variant
atggctcaaggcaaagtggcactggaagaacatttcgcaatcccggaaacgctgcaagactcggcaggcttcgtcccgggcgactactggaaagaactgcagcatcgtctgctggatatccaagacacccgcctgaaactgatggatgcgcacggcatcgaaacgatgattctgtccctggctgcaccggctgttcaggcgattccggaccgtcgcaaagccattgaaatcgcacgtcgcgctaatgatttcctggcagaagaatgcgctaaacgtccggaccgctttctggcattcgcagcactgccgctgcaggatccggacgcagctaccgaagaactgcaacgttgtgtcaacgatctgggcttcgtgggtgccctggttaatggctttagccaggaaggcgatggtcaaaccccgctgtattacgacctgccgcagtatcgcccgttctggggtgaagtcgaaaaactggatgtgccgttttatctgcatccgcgtaacccgctgccgcaggattcccgtatctacgacggtcacccgtggctgctgggtccgacctgggcgttcgcccaagaaacggcggtgcatgccctgcgtctgatggcatctggcctgtttgatgaacacccgcgtctgaatattatcctgggtcatctgggcgaaggtctgccgtacatgatgtaccgtatcgatcatcgtatcgcatgggttcacgagccgccgcgttatccggcaaaacgtcgctttatggactacttcaacgaaaattttcacattaccacgtcaggcaacttccgtacccagacgctgattgatgcaatcctggaaattggtgctgatcgcatcctgttctcgaccgactggccgtttgaaaacattgatcatgccgctgactggtttaatgctacgtctattgccgaagctgaccgtctgaaaatcggccgcaccaatgcccgtcgtctgttcaaactggatggcgct

SEQ ID NO: 627 - DNA, 984 bp, Artificial Sequence
  synthetic construct; Dicamba decarboxylase variant
atggctcaaggcaaagtggcactggaagaacatttcgcaatcccggaaacgctgcaagactcggcaggcttcgtcccgtctgattaccggaaagaactgcagcatcgtctgctggatatccaagacacccgcctgaaactgatggatgcgcacggcatcgaaacgatgattctgtccctggctgcaccggctgttcaggcgattccggaccgtcgcaaagccattgaaatcgcacgtcgcgctaatgatttcctggcagaagaatgcgctaaacgtccggaccgctttctggcattcgcagcactgccgctgcaggatccggacgcagctaccgaagaactgcaacgttgcgtcaacgatctgggcttcgtgggtgccctggttaatggctttagcgtggaaggcgatggtcaaaccccgctgtattacgacctgccgcagtatcgcccgttctggggtgaagtcgaaaaactggatgtgccgttttatctgcatccgcgtaacccgctgccgcaggattcccgtatctacgacggtcacccgtggctgctgggtccgacctgggcgttcgcccaagaaacggcggtgcatgccctgcgtctgatggcatctggcctgtttgatgaacacccgcgtctgaatattatcctgggtcatatgggcgaaggtctgccgtacatgatgtaccgtatcgatcatcgtatcgcatgggttcacgagccgccgcgttatccggcaaaacgtcgctttatggactacttcaacgaaaattttcacattaccacgtcaggcaacttccgtacccagacgctgattgatgcaatcctggaaattggtgctgatcgcatcctgttctcgaccgactggccgtttgaaaacattgatcatgccgctgactggtttaatgctacgtctattgccgaagctgaccgtgtcaaaatcggccgcaccaatgcccgtcgtctgttcaaactggatggtgac

SEQ ID NO: 628 - DNA, 984 bp, Artificial Sequence
  synthetic construct; Dicamba decarboxylase variant
atggctcaaggcaaagtggcactggaagaacatttcgcaatcccggaaacgctgcaagactcggcaggcttcgtcccgggcgactactggaaagaactgcagcatcgtctgctggatatccaagacacccgcctgaaactgatggatgcgcacggcatcggcacgatgattctgtccctggctgcaccggctgttcaggcgattccggaccgtcgcaaagccattgaaatcgcacgtcgcgctaatgatttcctggcagaagaatgcgctaaacgtccggaccgctttctggcattcgcagcactgccgctgcaggatccggacgcagctaccgaagaactgcaacgttgcgtcaacgatctgggcttcgtgggtgccctggttaatggctttagccaggaaggcgatggtcaaaccccgctgtattacgacctgccgcagtatcgcccgttctggggtgaagtcgaaaaactggatgtgccgttttatctgcatccgcgtaacccgctgccgcaggattcccgtatctacgacggtcacccgtggctgctgggtccgacctgggcgttcgcccaagaaacggcggtgcatgccctgcgtctgatggcatctggcctgtttgatgaacacccgcgtctgaatattatcctgggtcatctgggcgaaggtctgccgtacatgatgtaccgtatcgatcatcgtatcgcatgggttcacgagccgccgcgttatccggcaaaacgtcgctttatggactacttcaacgaaaattttcacattaccacgtcaggcaacttccgtacccagacgctgattgatgcaatcctggaaattggtgctgatcgcatcctgttctcgaccgactggccgtttgaaaacattgatcatgccgctgactggtttaatgctacgtctattgccgaagctgaccgtctgaaaatcggccgcaccaatgcccgtcgtctgttcaaactggatggcgct

SEQ ID NO: 629 - DNA, 984 bp, Artificial Sequence
  synthetic construct; Dicamba decarboxylase variant
atggctcaaggcaaagtggcactggaagaacatttcgcaatcccggagacgctgcaagactcggcaggcttcgtcccgggcgactactggaaagaactgcagcatcgtctgctggatatccaagacacccgcctgaaactgatggatgcgcacggcatcgaaacgatgattctgtccctggctgcaccggctgttcaggcgattccggaccgtcgcaaagccattgaaatcgcacgtcgcgctaatgatttcctggcagaagaatgcgctaaacgtccggaccgctttctggcattcgcagcactgccgctgcaggatccagacgcagctagcgaagaactgcaacgttgtgtcaacgatctgggcttcgtgggtgccctggttaatggctttagcgtggaaggcgatggtcaaaccccgctgtattacgacctgccgcagtatcgcccgttctggggtgaagtcgaaaaactggatgtgccgttttatctgcatccgcgtaacccgctgccgcaggattcccgtatctacgacggtcacccgtggctgctgggtccgacctgggcgttcgcccaagaaacggcggtgcatgccctgcgtctgatggcatctggcctgtttgatgaacacccgcgtctgaatattatcctgggtcatctgggcgaaggtctgccgtacatgatgtaccgtatcgatcatcgtatcgcatgggttcacgagccgccgcgttatccggcaaaacgtcgctttatggactacttcaacgaaaattttcacattaccacgtcaggcaacttccgtacccagacgctgattgatgcaatcctggaaattggtgctgatcgcatcctgttctcgaccgactggccgtttgaaaacattgatcatgccgctgactggtttaatgctacgtctattgccgaagctgaccgtgtcaaaatcggccgcaccaatgcccgtcgtctgttcaaactggatggtgac

SEQ ID NO: 630 - DNA, 984 bp, Artificial Sequence
  synthetic construct; Dicamba decarboxylase variant
atggctcaaggcaaagtggcactggaagaacatttcgcaatcccggaaacgctgcaagactcggcaggcttcgtcccgggcgactactggaaagaactgcagcatcgtctgctggatatccaagacacccgcctgaaactgatggatgcgcacggcatcgagacgatgattctgtccctggctgcaccggctgttcaggcgattccggaccgtcgcaaagccattgaaatcgcacgtcgcgctaatgatttcctggcagaagaatgcgctaaacgtccggaccgctttctggcattcgcagcactgccgctgcaggatccggacgcagctaccgaagaactgcaacgttgtgtcaacgatctgggcttcgtgggtgccctggttaatggctttagcgtggaaggcgatggtcaaaccccgctgtattacgacctgccgcagtatcgcccgttctggggtgaagtcgaaaaactggatgtgccgttttatctgcatccgcgtaacccgctgccgcaggattcccgtatctacgacggtcacccgtggctgctgggtccgacctgggcgttcgcccaagaaacggcggtgcatgccctgcgtctgatggcatctggcctgtttgatgaacacccgcgtctgaatattatcctgggtcatctgggcgaaggtctgccgtacatgatgtaccgtatcgatcatcgtatcgcatgggttaaactgccgccgcgttatccggcaaaacgtcgctttatggactacttcaacgaaaattttcacattaccacgtcaggcaacttccgtacccagacgctgattgatgcaatcctggaaattggtgctgatcgcatcctgttctcgaccgactggccgtttgaaaacattgatcatgccgctgactggtttaatgctacgtctattgccgaagctgaccgtgtcaaaatcggccgcaccaatgcccgtcgtctgttcaaactggatggccgt

SEQ ID NO: 631 - DNA, 984 bp, Artificial Sequence
  synthetic construct; Dicamba decarboxylase variant
atggctcaaggcaaagtggcactggaagaacatttcgcaatcccggcgacgctgcaggactcggcaggcttcgtcccgggcgactactggaaagaactgcagcatcgtctgctggatatccaagacacccgcctgaaactgatggatgcgcacggcatcgaaacgatgattctgtccctggctgcaccggctgttcaggcgattccggaccgtcgcaaagccattgaaatcgcacgtcgcgctaatgatttcctggcagaagaatgcgctaaacgtccggaccgctttctggcattcgcagcactgccgctgcaggatccggacgcagctaccgaagaactgcaacgttgtgtcaacgatctgggcttcgtgggtgccctggttaatggctttagccaggaaggcgatggtcaaaccccgctgtattacgacctgccgcagtatcgcccgttctggggtgaagtcgaaaaactggatgtgccgttttatctgcatccgcgtaacccgctgccgcaggattcccgtatctacgacggtcacccgtggctgctgggtccgacctgggcgttcgcccaagaaacggcggtgcatgccctgcgtctgatggcatctggcctgtttgatgaacacccgcgtctgaatattatcctgggtcatatgggcgaaggtctgccgtacatgatgtaccgtatcgatcatcgtatcgcatgggttcacgagccgccgcgttatccggcaaaacgtcgctttatggactacttcaacgaaaattttcacattaccacgtcaggcaacttccgtacccagacgctgattgatgcaatcctggaaattggtgctgatcgcatcctgttctcgaccgactggccgtttgaaaacattgatcatgccactgactggtttaatgctacgtctattgccgaagctgaccgtctgaaaatcggccgcaccaatgcccgtcgtctgttcaaactggatggcgct

SEQ ID NO: 632 - DNA, 984 bp, Artificial Sequence
  synthetic construct; Dicamba decarboxylase variant
atggctcaaggcaaagtggcactggaagaacatttcgcaatcccggaaacgctgcaagactcggcaggcttcgtcccgggcgactactggaaagaactgcagcatcgtctgctggatatccaagacacccgcctgaaactgatggatgcgcacggcatcgaaacgatgattctgtccctggctgcaccggctgttcaggcgattccggaccgtcgcaaagccattgaaatcgcacgtcgcgctaatgatttcctggcagaagaatgcgctaaacgtccggaccgctttctggcattcgcagcactgccgctgcaggatccggacgcagctaccgaagaactgcaacgttgtgtcaacactctgggcttcgtgggtgccctggttaatggctttagccaggaaggcgatggtcaaaccccgctgtattacgacctgccgcagtatcgcccgttctggggtgaagtcgaaaaactggatgtgccgttttatctgcatccgcgtaacccgctgccgcaggattcccgtatctacgacggtcacccgtggctgctgggtccgacctgggcgttcgcccaagaaacggcggtgcatgccctgcgtctgatggcatctggcctgtttgatgaacacccgcgtctgaatattatcctgggtcatctgggcgaaggtctgccgtacatgatgtaccgtatcgatcatcgtatcgcatgggttcacgagccgccgcgttatccggcaaaacgtcgctttatggactacttcaacgaaaattttcacattaccacgtcaggcaacttccgtacccagacgctgattgatgcaatcctggaaattggtgctgatcgcatcctgttctcgaccgactggccgtttgaaaacattgatcatgccgctgcctggtttaatgctacgtctattgccgaagctgaccgtgtcaaaatcggccgcaccaatgcccgtcgtctgttcaaactggatggtgac

SEQ ID NO: 633 - DNA, 984 bp, Artificial Sequence
  synthetic construct; Dicamba decarboxylase variant
atggctcaaggcaaagtggcactggaagaacatttcgcaatcccggaaacgctgcaagactcggcaggcttcgtcccgggcgactactggaaagaactgcagcatcgtctgctggatatccaagacacccgcctgaaactgatggatgcgcacggcatcgaaacgatgattctgtccctggctgcaccgggtgttcaggcgattccggaccgtgtaaaagccattgaaatcgcacgtcgcgctaatgatttcctggcagaagaatgcgctaaacgtccggaccgctttctggcattcgcagcactgccgctgcaggatccggacgcagctaccgaagaactgcaacgttgtgtcaacgatctgggcttcgtgggtgccctggttaatggctttagccaggaaggcgatggtcaaaccccgctgtattacgacctgccgcagtatcgcccgttctggggtgaagtcgaaaaactggatgtgccgttttatctgcatccgcgtaacccgctgccgcaggattcccgtatctacgacggtcacccgtggctgctgggtccgacctgggcgttcgcccaagaaacggcggtgcatgccctgcgtctgatggcatctggcctgtttgatgaacacccgcgtctgaatattatcctgggtcatatgggcgaaggtctgccgtacatgatgtaccgtatcgatcatcgtatcgcatgggttcacgagccgccgcgttatccggcaaaacgtcgctttatggactacttcaacgaaaattttcacattaccacgtcaggcaacttccgtacccagacgctgattgatgcaatcctggaaattggtgctgatcgcatcctgttctcgaccgactggccgtttgaaaacattgatcatgccgctgactggtttaatgctacgtctattgccgaagctgaccgtgtcaaaatcggccgcaccaatgcccgtcgtctgttcaaactggatggcgct

SEQ ID NO: 634 - DNA, 984 bp, Artificial Sequence
  synthetic construct; Dicamba decarboxylase variant
atggctcaaggcaaagtggcactggaagaacatttcgcaatcccggaaacgctgcaagactcggcaggcttcgtcccgggcgactactggaaagaactgcagcatcgtctgctggatatccaagacacccgcctgaaactgatggatgcgcacggcatcgaaacgatgattctgtccctggctgcaccggctgttcaggcgattccggaccgtcgcaaagccattgaaatcgcacgtcgcgctaatgatatgctggcagaagaatgcgctaaacgtccggaccgctttctggcattcgcagcactgccgctgcaggatccggacgcagctaccgaagaactgcaacgttgcgtcaacgacctgggcttcgtgggtgccatggttaatggctttagccaggaaggcgatggtcaaaccccgctgtattacgacctgccgcagtatcgcccgttctggggtgaagtcgaaaaactggatgtgccgttttatctgcatccgcgtaacccgctgccgcaggattcccgtatctacgacggtcacccgtggctgctgggtccgacctgggcgttcgcccaagaaacggcggtgcatgccctgcgtctgatggcatctggcctgtttgatgaacacccgcgtctgaatattatcctgggtcatctgggcgaaggtctgccgtacatgatgtaccgtatcgatcatcgtatcgcatgggttcacgagccgccgcgttatccggcaaaacgtcgctttatggactacttcaacgaaaattttcacattaccacgtcaggcaacttccgtacccagacgctgattgatgcaatcctggaaattggtgctgatcgcatcctgttctcgaccgactggccgtttgaaaacattgatcatgccgctgactggtttaatgctacgtctattgccgaagctgaccgtgtcaaaatcggccgcaccaatgcccgtcgtctgttcaaactggatggcgct

SEQ ID NO: 635 - DNA, 984 bp, Artificial Sequence
  synthetic construct; Dicamba decarboxylase variant
atggctcaaggcaaagtggcactggaagaacatttcgcaatcccggaaacgctgcaagactcggcaggcttcgtcccgggcgactactggaaagaactgcagcatcgtctgctggatatccaagacacccgcctgcacctgatggatgcgcacggcatcgaaacgatgattctgtccctggctgcacctggtgttcaggcgattccggaccgtcgcaaagccattgaaatcgcacgtcgcgctaatgatttcctggcagaagaatgcgctaaacgtccggaccgctttctggcattcgcagcactgccgctgcaggatccggacgcagctaccgaagaactgcaacgttgcgtcaacgatctgggcttcgtgggtgccctggttaatggctttagccaggaaggcgatggtcaaaccccgctgtattacgacctgccgcagtatcgcccgttctggggtgaagtcgaaaaactggatgtgccgttttatctgcatccgcgtaacccgctgccgcaggattcccgtatctacgacggtcacccgtggctgctgggtccgacctgggcgttcgcccaagaaacggcggtgcatgccctgcgtctgatggcatctggcctgtttgatgaacacccgcgtctgaatattatcctgggtcatatgggcgaaggtctgccgtacatgatgtaccgtatcgatcatcgtatcgcatgggttcacccgccgccgcgttatccggcaaaacgtcgctttatggactacttcaacgaaaattttcacattaccacgtcaggcaacttccgtacccagacgctgattgatgcaatcctggaaattggtgctgatcgcatcctgttctcgaccgactggccgtttgaaaacattgatcatgccgctgactggtttaatgctacgtctattgccgaagctgaccgtgtgaaaatcggccgcaccaatgcccgtcgtctgttcaaactggatggcgct

SEQ ID NO: 636 - DNA, 984 bp, Artificial Sequence
  synthetic construct; Dicamba decarboxylase variant
atggctcaaggcaaagtggcactggaagaacatttcgcaatcccggaaacgctgcaagactcggcaggcttcgtcccgggcgactactggaaagaactgcagcatcgtctgctggatatccaagacacccgcctgaaactgatggatgcgcacggcatcgaaacgatgattctgtccctggctgcaccggctgttcaggcgattccggaccgtcgcaaagccattgaaatcgcacgtcgcgctaatgatttcctggcagaagaatgcgctaaacgtccggaccgctttctggcattcgcagcactgccgctgcaggatccggacgcagctaccgaagaactgcaacgttgcgtcaacactctgggcttcgtgggtgccctggttaatggctttagccaggaaggcgatggtcaaaccccgctgtattacgacctgccgcagtatcgcccgttctggggtgaagtcgaaaaactggatgtgccgttttatctgcatccgcgtaacccgctgccgcaggattcccgtatctacgacggtcacccgtggctgctgggtccgacctgggcgttcgcccaagaaacggcggtgcatgccctgcgtctgatggcatctggcctgtttgatgaacacccgcgtctgaatattatcctgggtcatatgggcgaaggtctgccgtacatgatgtaccgtatcgatcatcgtatcgcatgggttcacgagccgccgcgttatccggcaaaacgtcgctttatggactacttcaacgaaaattttcacattaccacgtcaggcaacttccgtacccagacgctgattgatgcaatcctggaaattggtgctgatcgcatcctgttctcgaccgactggccgtttgaaaacattgatcatgccgctgactggtttaatgctacgtctattgccgaagctgaccgtgtcaaaatcggccgcaccaatgcccgtcgtctgttcaaactggatggtgac

SEQ ID NO: 637 - DNA, 984 bp, Artificial Sequence
  synthetic construct; Dicamba decarboxylase variant
atggctcaaggcaaagtggcactggaggaacatttcgcaatcccggaaacgctgcaagactcggcaggcttcgtcccgggcgactactggaaagaactgcagcatcgtctgctggatatccaagacacccgcctgaaactgatggatgcgcacggcatcgaaacgatgattctgtccctggctgcaccggctgttcaggcgattccggaccgtcgcaaagccattgaaatcgcacgtcgcgctaatgatttcctggcagaagaatgcgctaaacgtccggaccgctttctggcattcgcagcactgccgctgcaggatccggacgcagctaccgaagaactgcaacgttgcgtcaacactctgggcttcgtgggtgccctggttaatggctttagccaggaaggcgatggtcaaaccccgctgtattacgacctgccgcagtatcgcccgttctggggtgaagtcgaaaaactggatgtgccgttttacctgcatccgcgtaacccgctgccgcaggattcccgtatctacgacggtcacccgtggctgctgggtccgacctgggcgttcgcccaagaaacggcggtgcatgccctgcgtctgatggcatctggcctgtttgatgaacacccgcgtctgaatattatcctgggtcatatgggcgaaggtctgccgtacatgatgtaccgtatcgatcatcgtatcgcatgggttcacgagccgccgcgttatccggcaaaacgtcgctttatggactacttcaacgaaaattttcacattaccacgtcaggcaacttccgtacccagacgctgattgatgcaatcctggaaattggtgctgatcgcatcctgttctcgaccgactggccgtttgaaaacattgatcatgccgctgactggtttaatgctacgtctattgccgaagctgaccgtgtcaaaatcggccgcaccaatgcccgtcgtctgttcaaactggatggcgct

SEQ ID NO: 638 - DNA, 984 bp, Artificial Sequence
  synthetic construct; Dicamba decarboxylase variant
atggctcaaggcaaagtggcactggaagaacatttcgcaatcccggaaacgctgcaagactcggcaggcttcgtcccgggcgactactggaaagaactgcagcatcgtctgctggatatccaagacacccgcctgaaactgatggatgcgcacggcatcgaaacgatgattctgtccctggctgcaccggctgttcaggcgattccggaccgtcgcaaagccattgaaatcgcacgtcgcgctaatgatttcctggcagaagaatgcgctaaacgtccggaccgctttctggcattcgcagcactgccgctgcaggatccggacgcagctaccgaagaactgcaacgttgcgtcaacgatctgggcttcgtgggtgccctggttaatggctttagccaggaaggcgatggtcaaaccccgctgtattacgacctgccgcagtatcgcccgttctggggtgaagtcgaaaaactggatgtgccgttttatctgcatccgcgtaacccgctgccgcaggattcccgtatctacgacggtcacccgtggctgctgggtccgacctgggcgttcgcccaagaaacggcggtgcatgccctgcgtctgatggcatctggcctgtttgatgaacacccgcgtctgaatattatcctgggtcatatgggcgaaggtctgccgtacatgatgtaccgtatcgatcatcgtatcgcatgggttcacccaccgccgcgttatccggcaaaacgtcgctttatggactacttcaacgaaaattttcacattaccacgtcaggcaacttccgtacccagacgctgattgatgcaatcctggaaattggtgctgatcgcatcctgttctcgaccgactggccgtttgaaaacattgatcatgccgctgactggtttaatgctacgtctattgccgaagctgaccgtgtcaaaatcggccgcaccaatgcccgtcgtctgttcaaactggatggcgct

SEQ ID NO: 639 - DNA, 984 bp, Artificial Sequence
  synthetic construct; Dicamba decarboxylase variant
atggctcaaggcaaagtggcactggaagaacatttcgcaatcccggaaacgctgcaagactcggcaggcttcgtcccgggcgactactggaaagaactgcagcatcgtctgctggatatccaagacacccgcctgaaactgatggatgcgcacggcatcgagacgatgattctgtccctggctgcaccggctgttcaggcgattccggaccgtcgcaaagccattgaaatcgcacgtcgcgctaatgatttcctggcagaagaatgcgctaaacgtccggaccgctttctggcattcgcagcactgccgctgcaggatccggacgcagctaccgaagaactgcaacgttgtgtcaacgatctgggcttcgtgggtgccctggttaatggctttagcgtggaaggcgatggtcaaaccccgctgtattacgacctgccgcagtatcgcccgttctggggtgaagtcgaaaaactggatgtgccgttttatctgcatccgcgtaacccgctgccgcaggattcccgtatctacgacggtcacccgtggctgctgggtccgacctgggcgttcgcccaagaaacggcggtgcatgccctgcgtctgatggcatctggcctgtttgatgaacacccgcgtctgaatattatcctgggtcatatgggcgaaggtctgccgtacatgatgtaccgtatcgatcatcgtatcgcatgggttcacgagccgccgcgttatccggcaaaacgtcgctttatggactacttcaacgaaaattttcacattaccacgtcaggcaacttccgtacccagacgctgattgatgcaatcctggaaattggtgctgatcgcatcctgttctcgaccgactggccgtttgaaaacattgatcatgccgctgactggtttaatgctacgtctattgccgaagctgaccgtgtcaaaatcggccgcaccaatgcccgtcgtctgttcaaactggatggcgct

SEQ ID NO: 640 - DNA, 984 bp, Artificial Sequence
  synthetic construct; Dicamba decarboxylase variant
atggctcaaggcaaagtggcactggaagaacatttcgcaatcccggaaacgctgcaagactcggcaggcttcgtcccgggcgactactggaaagaactgcagcatcgtctgctggatatccaagacacccgcctgaaactgatggatgcgcacggcatcgaaacgatgattctgtccctggctgcaccggctgttcaggcgattccggaccgtcgcaaagccattgaaatcgcacgtcgcgctaatgatttcctggcagaagaatgcgctaaacgtccggaccgctttctggcattcgcagcactgccgctgcaggatccggacgcagctaccgaagaactgcaacgttgcgtcaacgacctgggcttcgtgggtgccctggttaatggctttagcgtggaaggcgatggtcaaaccccgctgtattacgacctgccgcagtatcgcccgttctggggtgaagtcgaaaaactggatgtgccgttttatctgcatccgcgtaacccgctgccgcaggattcccgtatctacgacggtcacccgtggctgctgggtccgacctgggcgttcgcccaagaaacggcggtgcatgccctgcgtctgatggcatctggcctgtttgatgaacacccgcgtctgaatattatcctgggtcatatgggcgaaggtctgccgtacatgatgtaccgtatcgatcatcgtatcgcatgggttcacgagccgccgcgttatccggcaaaacgtcgctttatggactacttcaacgaaaattttcacattaccacgtcaggcaacttccgtacccagacgctgattgatgcaatcctggaaattggtgctgatcgcatcctgttctcgaccgactggccgtttgaaaacattgatcatgccgctgactggtttaatgctacgtctattgccgaagctgaccgtctgaaaatcggccgcaccaatgcccgtcgtctgttcaaactggatctggac

SEQ ID NO: 641 - DNA, 984 bp, Artificial Sequence
  synthetic construct; Dicamba decarboxylase variant
atggctcaaggcaaagtggcactggaagaacatttcgcaatcccggaaacgctgcaagactcggcaggcttcgtcccgggcgactactggaaagaactgcagcatcgtctgctggatatccaagacacccgcctgaaactgatggatgcgcacggcatcgaaacgatgattctgtccctggctgcaccggctgttcaggcgattccggaccgtcgcaaagccattgaaatcgcacgtcgcgctaatgatttcctggcagaagaatgcgctaaacgtccggaccgctttctggcattcgcagcactgccgctgcaggatccggacgcagctaccgaagaactgcaacgttgtgtcaacgatctgggcttcgtgggtgccctggttaatggctttagccaggaaggcgatggtcaaaccccgctgtattacgacctgccgcagtatcgcccgttctggggtgaagtcgaaaaactggatgtgccgttttatctgcatccgcgtaacccgctgccgcaggattcccgtatctacgacggtcacccgtggctgctgggtccgacctgggcgttcgcccaagaaacggcggtgcatgccctgcgtctgatggcatctggcctgtttgatgaacacccgcgtctgaatattatcctgggtcatctgggcgaaggtctgccgtacatgatgtaccgtatcgatcatcgtatcgcatgggttaaactgccgccgcgttatccggcaaaacgtcgctttatggactacttcaacgaaaattttcacattaccacgtcaggcaacttccgtacccagacgctgattgatgcaatcctggaaattggtgctgatcgcatcctgttctcgaccgactggccgtttgaaaacattgatcatgccgctgactggtttaatgctacgtctattgccgaagctgaccgtctgaaaatcggccgcaccaatgcccgtcgtctgttcaaactggatggtgac

SEQ ID NO: 642 - DNA, 984 bp, Artificial Sequence
  synthetic construct; Dicamba decarboxylase variant
atggctcaaggcaaagtggcactggaagaacatttcgcaatcccggaaacgctgcaagactcggcaggcttcgtcccgggcgactactggaaagaactgcagcatcgtctgctggatatccaagacacccgcctgcacctgatggatgcgcacggcatcgaaacgatgattctgtccctggctgcaccggctgttcaggcgattccggaccgtcgcaaagccattgaaatcgcacgtcgcgctaatgatttcctggcagaagaatgcgctaaacgtccggaccgctttctggcattcgcagcactgccgctgcaggatccggacgcagctaccgaagaactgcaacgttgcgtcaacgatctgggcttcgtgggtgccctggttaatggctttagccaggaaggcgatggtcaaaccccgctgtattacgacctgccgcagtatcgcccgttctggggtgaagtcgaaaaactggatgtgccgttttatctgcatccgcgtaacccgctgccgcaggattcccgtatctacgacggtcacccgtggctgctgggtccgacctgggcgttcgcccaagaaacggcggtgcatgccctgcgtctgatggcatctggcctgtttgatgaacacccgcgtctgaatattatcctgggtcatatgggcgaaggtctgccgtacatgatgtaccgtatcgatcatcgtatcgcatgggttcaccagccgccgcgttatccggcaaaacgtcgctttatggactacttcaacgaaaattttcacattaccacgtcaggcaacttccgtacccagacgctgattgatgcaatcctggaaattggtgctgatcgcatcctgttctcgaccgactggccgtttgaaaacattgatcatgccgctgactggtttaatgctacgtctattgccgaagctgaccgtgtcaaaatcggccgcaccaatgcccgtcgtctgttcaaactggatggcgct

SEQ ID NO: 643 - DNA, 984 bp, Artificial Sequence
  synthetic construct; Dicamba decarboxylase variant
atggctcaaggcaaagtggcactggaagaacatttcgcaatcccggaaacgctgcaagactcggcaggcttcgtcccgggcgactactggaaagaactgcagcatcgtctgctggatatccaagacacccgcctgaaactgatggatgcgcacggcatcgaaacgatgattctgtccctggctgcaccggctgttcaggcgattccggaccgtcgcaaagccattgaaatcgcacgtcgcgctaatgatttcctggcagaagaatgcgctaaacgtccggaccgctttctggcattcgcagcactgccgctgcaggatccggacgcagctaccgaagaactgcaacgttgtgtcaacgatctgggcttcgtgggtgccctggttaatggctttagccaggaaggcgatggtcaaaccccgctgtattacgacctgccgcagtatcgcccgttctggggtgaagtcgaaaaactggatgtgccgttttatctgcatccgcgtaacccgctgccgcaggattcccgtatctacgacggtcacccgtggctgctgggtccgacctgggcgttcgcccaagaaacggcggtgcatgccctgcgtctgatggcatctggcctgtttgatgaacacccgcgtctgaatattatcctgggtcatctgggcgaaggtctgccgtacatgatgtaccgtatcgatcatcgtatcgcatgggttcacccaccgccgcgttatccggcaaaacgtcgctttatggactacttcaacgaaaattttcacattaccacgtcaggcaacttccgtacccagacgctgattgatgcaatcctggaaattggtgctgatcgcatcctgttctcgaccgactggccgtttgaaaacattgatcatgccgctgactggtttaatgctacgtctattgccgaagctgaccgtctgaaaatcggccgcaccaatgcccgtcgtctgttcaaactggatggcgct

SEQ ID NO: 644 - DNA, 984 bp, Artificial Sequence
  synthetic construct; Dicamba decarboxylase variant
atggctcaaggcaaagtggcactggaagaacatttcgcaatcccggaaacgctgcaagactcggcaggcttcgtcccgggcgactactggaaagaactgcagcatcgtctgctggatatccaagacacccgcctgaaactgatggatgcgcacggcatcgaaacgatgattctgtccctggctgcaccggctgttcaggcgattccggaccgtcgcaaagccattgaaatcgcacgtcgcgctaatgatatgctggcagaagaatgcgctaaacgtccggaccgctttctggcattcgcagcactgccgctgcaggatccggacgcagctaccgaagaactgcaacgttgtgtcaacgatctgggcttcgtgggtgccctggttaatggctttagccaggaaggcgatggtcaaaccccgctgtattacgacctgccgcagtatcgcccgttctggggtgaagtcgaaaaactggatgtgccgttttatctgcatccgcgtaacccgctgccgcaggattcccgtatctacgacggtcacccgtggctgctgggtccgacctgggcgttcgcccaagaaacggcggtgcatgccctgcgtctgatggcatctggcctgtttgatgaacacccgcgtctgaatattatcctgggtcatctgggcgaaggtctgccgtacatgatgtaccgtatcgatcatcgtatcgcatgggttcacccaccgccgcgttatccggcaaaacgtcgctttatggactacttcaacgaaaattttcacattaccacgtcaggcaacttccgtacccagacgctgattgatgcaatcctggaaattggtgctgatcgcatcctgttctcgaccgactggccgtttgaaaacattgatcatgccgctgactggtttaatgctacgtctattgccgaagctgaccgtgtcaaaatcggccgcaccaatgcccgtcgtctgttcaaactggatggtgac

SEQ ID NO: 645 - DNA, 984 bp, Artificial Sequence
  synthetic construct; Dicamba decarboxylase variant
atggctcaaggcaaagtggcactggaagaacatttcgcaatcccggaaacgctgcaagactcggcaggcttcgtcccgggcgactactggaaagaactgcagcatcgtctgctggatatccaagacacccgcctgaaactgatggatgcgcacggcatcgaaacgatgattctgtccctggctgcaccggctgttcaggcgattccggaccgtcgcaaagccattgaaatcgcacgtcgcgctaatgatttcctggcagaagaatgcgctaaacgtccggaccgctttctggcattcgcagcactgccgctgcaggatccggacgcagctaccgaagaactgcaacgtaccgtcaacgatctgggcttcgtgggtgccctggttaatggctttagcgtggaaggcgatggtcaaaccccgctgtattacgacctgccgcagtatcgcccgttctggggtgaagtcgaaaaactggatgtgccgttttatctgcatccgcgtaacccgctgccgcaggattcccgtatctacgacggtcacccgtggctgctgggtccgacctgggcgttcgcccaagaaacggcggtgcatgccctgcgtctgatggcatctggcctgtttgatgaacacccgcgtctgaatattatcctgggtcatctgggcgaaggactgccgtacatgatgtaccgtatcgatcatcgtatcgcatgggttaaactgccgccgcgttatccggcaaaacgtcgctttatggactacttcaacgaaaattttcacattaccacgtcaggcaacttccgtacccagacgctgattgatgcaatcctggaaattggtgctgatcgcatcctgttctcgaccgactggccgtttgaaaacattgatcatgccgctgactggtttaatgctacgtctattgccgaagctgaccgtctgaaaatcggccgcaccaatgcccgtcgtctgttcaaactggatggtgac

SEQ ID NO: 646 - DNA, 984 bp, Artificial Sequence
  synthetic construct; Dicamba decarboxylase variant
atggctcaaggcaaagtggcactggaagaacatttcgcaatcccggaaacgctgcaagactcggcaggcttcgtcccgggcgactactggaaagaactgcagcatcgtctgctggatatccaagacacccgcctgaaactgatggatgcgcacggcatcgaaacgatgattctgtccctggctgcaccggctgttcaggcgattccggaccgtcgcaaagccattgaaatcgcacgtcgcgctaatgatatgctggcagaagaatgcgctaaacgtccggaccgctttctggcattcgcagcactgccgctgcaggatccggacgcagctaccgaagaactgcaacgttgtgtcaacgatctgggcttcgtgggtgccctggttaatggctttagccaggaaggcgatggtcaaaccccgctgtattacgacctgccgcagtatcgcccgttctggggtgaagtcgaaaaactggatgtgccgttttatctgcatccgcgtaacccgctgccgcaggattcccgtatctacgacggtcacccgtggctgctgggtccgacctgggcgttcgcccaagaaacggcggtgcatgccctgcgtctgatggcatctggcctgtttgatgaacacccgcgtctgaatattatcctgggtcatctgggcgaaggtctgccgtacatgatgtaccgtatcgatcatcgtatcgcatgggttcacgagccgccgcgttatccggcaaaacgtcgctttatggactacttcaacgaaaattttcacattaccacgtcaggcaacttccgtacccagacgctgattgatgcaatcctggaaattggtgctgatcgcatcctgttctcgaccgactggccgtttgaaaacattgatcatgccgctgactggtttaatgctacgtctattgccgaagctgaccgtgtcaaaatcggccgcaccaatgcccgtcgtctgttcaaactggatggcgct

SEQ ID NO: 647 - DNA, 984 bp, Artificial Sequence
  synthetic construct; Dicamba decarboxylase variant
atggctcaaggcaaagtggcactggaagaacatttcgcaatcccggaaacgctgcaagactcggcaggcttcgtcccgggcgactactggaaagaactgcagcatcgtctgctggatatccaagacacccgcctgaaactgatggatgcgcacggcatcgaaacgatgattctgtccctggctgcaccggctgttcaggcgattccggaccgtcgcaaagccattgaaatcgcacgtcgcgctaatgatttcctggcagaagaatgcgctaaacgtccggaccgctttctggcattcgcagcactgccgctgcaggatccggacgcagctaccgaagaactgcaacgttgtgtcaacgatctgggcttcgtgggtgccctggttaatggctttagccaggagggcgatggtcaaaccccgctgtattacgacctgccgcagtatcgcccgttctggggtgaagtcgaaaaactggatgtgccgttttatctgcatccgcgtaacccgctgccgcaggattcccgtatctacgacggtcacccgtggctgctgggtccgacctgggcgttcgcccaagaaacggcggtgcatgccctgcgtctgatggcatctggcctgtttgatgaacacccgcgtctgaatattatcctgggtcatctgggcgaaggtctgccgtacatgatgtaccgtatcgatcatcgtatcgcatgggttcacgagccgccgcgttatccggcaaaacgtcgctttatggactacttcaacgaaaattttcacattaccacgtcaggcaacttccgtacccagacgctgattgatgcaatcctggaaattggtgctgatcgcatcctgttctcgaccgactggccgtttgaaaacattgatcatgccgctgactggtttaatgctacgtctattgccgaagctgaccgtgtcaaaatcggccgcaccaatgcccgtcgtctgttcaaactggatggtgac

SEQ ID NO: 648 - DNA, 984 bp, Artificial Sequence
  synthetic construct; Dicamba decarboxylase variant
atggctcaaggcaaagtggcactggaagaacatttcgcaatcccggaaacgctgcaagactcggcaggcttcgtcccgggcgactactggaaagaactgcagcatcgtctgctggatatccaagacacccgcctgaaactgatggatgcgcacggcatcgaaacgatgattctgtccctggctgcaccggctgttcaggcgattccggaccgtcgcaaagccattgaaatcgcacgtcgcgctaatgatttcctggcagaagaatgcgctaaacgtccggaccgctttctggcattcgcagcactgccgctgcaggatccagacgcagctaccgaagaactgcaacgttgtgtcaacgatctgggcttcgtgggtgccctggttaatggctttagccaggaaggcgatggtcaaaccccgctgtattacgacctgccgcagtatcgcccgttctggggtgaagtcgaaaaactggatgtgccgttttatctgcatccgcgtaacccgctgccgcaggattcccgtatctacgacggtcacccgtggctgctgggtccgacctgggcgttcgcccaagaaacggcggtgcatgccctgcgtctgatggcatctggcctgtttgatgaacacccgcgtctgaatattatcctgggtcatatgggcgaaggtctgccgtacatgatgtaccgtatcgatcatcgtatcgcatgggttcacgagccgccgcgttatccggcaaaacgtcgctttatggactacttcaacgaaaattttcacattaccacgtcaggcaacttccgtacccagacgctgattgatgcaatcctggaaattggtgctgatcgcatcctgttctcgaccgactggccgtttgaaaacattgatcatgccgctgactggtttaatgctacgtctattgccgaagctgaccgtctgaaaatcggccgcaccaatgcccgtcgtctgttcaaactggatggcgct

SEQ ID NO: 649 - DNA, 984 bp, Artificial Sequence
  synthetic construct; Dicamba decarboxylase variant
atggctcaaggcaaagtggcactggaagaacatttcgcaatcccggaaacgctgaacgactcggcaggcttcgtcccgggcgactactggaaagaactgcagcatcgtctgctggatatccaagacacccgcctgaaactgatggatgcgcacggcatcgagacgatgattctgtccctggctgcaccggctgttcaggcgattccggaccgtcgcaaagccattgaaatcgcacgtcgcgctaatgatttcctggcagaagaatgcgctaaacgtccggaccgctttctggcattcgcagcactgccgctgcaggatccagacgcagctagcgaagaactgcaacgttgtgtcaacgatctgggcttcgtgggtgccctggttaatggctttagcgtggaaggcgatggtcaaaccccgctgtattacgacctgccgcagtatcgcccgttctggggtgaagtcgaaaaactggatgtgccgttttatctgcatccgcgtaacccgctgccgcaggattcccgtatctacgacggtcacccgtggctgctgggtccgacctgggcgttcgcccaagaaacggcggtgcatgccctgcgtctgatggcatctggcctgtttgatgaacacccgcgtctgaatattatcctgggtcatatgggcgaaggtctgccgtacatgatgtaccgtatcgatcatcgtatcgcatgggttcacgagccgccgcgttatccggcaaaacgtcgctttatggactacttcaacgaaaattttcacattaccacgtcaggcaacttccgtacccagacgctgattgatgcaatcctggaaattggtgctgatcgcatcctgttctcgaccgactggccgtttgaaaacattgatcatgccactgcctggtttaatgctacgtctattgccgaagctgaccgtgtcaaaatcggccgcaccaatgcccgtcgtctgttcaaactggatctggac

SEQ ID NO: 650 - DNA, 984 bp, Artificial Sequence
  synthetic construct; Dicamba decarboxylase variant
atggctcaaggcaaagtggcactggaagaacatttcgcaatcccggagacgctgaacgactcggcaggcttcgtcccgggcgactactggaaagaactgcagcatcgtctgctggatatccaagacacccgcctgaaactgatggatgcgcacggcatcgaaacgatgattctgtccctggctgcaccggctgttcaggcgattccggaccgtcgcaaagccattgaaatcgcacgtcgcgctaatgatttcctggcagaagaatgcgctaaacgtccggaccgctttctggcattcgcagcactgccgctgcaggatccggacgcagctaccgaagaactgcaacgttgtgtcaacgatctgggcttcgtgggtgccctggttaatggctttagccaggaaggcgatggtcaaaccccgctgtattacgacctgccgcagtatcgcccgttctggggtgaagtcgaaaaactggatgtgccgttttatctgcatccgcgtaacccgctgccgcaggattcccgtatctacgacggtcacccgtggctgctgggtccgacctgggcgttcgcccaagaaacggcggtgcatgccctgcgtctgatggcatctggcctgtttgatgaacacccgcgtctgaatattatcctgggtcatatgggcgaaggtctgccgtacatgatgtaccgtatcgatcatcgtatcgcatgggttcacgagccgccgcgttatccggcaaaacgtcgctttatggactacttcaacgaaaattttcacattaccacgtcaggcaacttccgtacccagacgctgattgatgcaatcctggaaattggtgctgatcgcatcctgttctcgaccgactggccgtttgaaaacattgatcatgccgctgactggtttaatgctacgtctattgccgaagctgaccgtgtcaaaatcggccgcaccaatgcccgtcgtctgttcaaactggatggcgct

SEQ ID NO: 651 - DNA, 984 bp, Artificial Sequence
  synthetic construct; Dicamba decarboxylase variant
atggctcaaggcaaagtggcactggaagaacatttcgcaatcccggaaacgctgcaagactcggcaggcttcgtcccgggcgactactggaaagaactgcagcatcgtctgctggatatccaagacacccgcctgaaactgatggatgcgcacggcatcgaaacgatgattctgtccctggctgcaccggctgttcaggcgattccggaccgtcgcaaagccattgaaatcgcacgtcgcgctaatgatttcctggcagaagaatgcgctaaacgtccggaccgctttctggcattcgcagcactgccgctgcaggatccggacgcagctaccgaagaactgcaacgttgtgtcaacgatctgggcttcgtgggtgccctggttaatggctttagccaggaaggcgatggtcaaaccccgctgtattacgacctgccgcagtatcgcccgttctggggtgaagtcgaaaaactggatgtgccgttttatctgcatccgcgtaacccgctgccgcaggattcccgtatctacgacggtcacccgtggctgctgggtccgacctgggcgttcgcccaagaaacggcggtgcatgccctgcgtctgatggcatctggcctgtttgatgaacacccgcgtctgaatattatcctgggtcatatgggcgaaggtctgccgtacatgatgtaccgtatcgatcatcgtatcgcatgggttcacgagccgccgcgttatccggcaaaacgtcgctttatggactacttcaacgaaaattttcacattaccacgtcaggcaacttccgtacccagacgctgattgatgcaatcctggaaattggtgctgatcgcatcctgttctcgaccgactggccgtttgaaaacattgatcatgccgctgactggtttaatgctacgtctattgccgaagctgaccgtgtcaaaatcggccgcaccaatgcccgtcgtctgttcaaactggatctggac

SEQ ID NO: 652 - DNA, 984 bp, Artificial Sequence
  synthetic construct; Dicamba decarboxylase variant
atggctcaaggcaaagtggcactggaagaacatttcgcaatcccggaaacgctgcaagactcggcaggcttcgtcccgggcgactactggaaagaactgcagcatcgtctgctggatatccaagacacccgcctgaaactgatggatgcgcacggcatcgaaacgatgattctgtccctggctgcaccggctgttcaggcgattccggaccgtcgcaaagccattgaaatcgcacgtcgcgctaatgatttcctggcagaagaatgcgctaaacgtccggaccgctttctggcattcgcggcactgccgctgcaggatccggacgcagctaccgaagaactgcaacgtaccgtcaacgacctgggcttcgtgggtgccctggttaatggctttagccaggaaggcgatggtcaaaccccgctgtattacgacctgccgcagtatcgcccgttctggggtgaagtcgaaaaactggatgtgccgttttatctgcatccgcgtaacccgctgccgcaggattcccgtatctacgacggtcacccgtggctgctgggtccgacctgggcgttcgcccaagaaacggcggtgcatgccctgcgtctgatggcatctggcctgttcgatgaacacccgcgtctgaatattatcctgggtcatatgggcgaaggtctgccgtacatgatgtaccgtatcgatcatcgtatcgcatgggttcacgagccgccgcgttatccggcaaaacgtcgctttatggactacttcaacgaaaattttcacattaccacgtcaggcaacttccgtacccagacgctgattgatgcaatcctggaaattggtgctgatcgcatcctgttctcgaccgactggccgtttgaaaacattgatcatgccgctgactggtttaatgctacgtctattgccgaagctgaccgtctgaaaatcggccgcaccaatgcccgtcgtctgttcaaactggatggtgac

SEQ ID NO: 653 - DNA, 984 bp, Artificial Sequence
  synthetic construct; Dicamba decarboxylase variant
atggctcaaggcaaagtggcactggaagaacatttcgcaatcccggaaacgctgcaagactcggcaggcttcgtcccgggcgactactggaaagaactgcagcatcgtctgctggatatccaagacacccgcctgaaactgatggatgcgcacggcatcgaaacgatgattctgtccctggctgcaccggctgttcaggcgattccggaccgtcgcaaagccattgaaatcgcacgtcgcgctaatgatttcctggcagaagaatgcgctaaacgtccggaccgctttctggcattcgcagcactgccgctgcaggatccggacgcagctaccgaagaactgcaacgttgcgtcaacgacctgggcttcgtgggtgccctggttaatggctttagccaggaaggcgatggtcaaaccccgctgtattacgacctgccgcagtatcgcccgttctggggtgaagtcgaaaaactggatgtgccgttttatctgcatccgcgtaacccgctgccgcaggattcccgtatctacgacggtcacccgtggctgctgggtccgacctgggcgttcgcccaagaaacggcggtgcatgccctgcgtctgatggcatctggcctgtttgatgaacacccgcgtctgaatattatcctgggtcatctgggcgaaggtctgccgtacatgatgtaccgtatcgatcatcgtatcgcatgggttaaactgccgccgcgttatccggcaaaacgtcgctttatggactacttcaacgaaaattttcacattaccacgtcaggcaacttccgtacccagacgctgattgatgcaatcctggaaattggtgctgatcgcatcctgttctcgaccgactggccgtttgaaaacattgatcatgccactgactggtttaatgctacgtctattgccgaagctgaccgtgtcaaaatcggccgcaccaatgcccgtcgtctgttcaaactggatggtgac

SEQ ID NO: 654 - DNA, 984 bp, Artificial Sequence
  synthetic construct; Dicamba decarboxylase variant
atggctcaaggcaaagtggcactggaagaacatttcgcaatcccggaaacgctgcaagactcggcaggcttcgtcccgggcgactactggaaagaactgcagcatcgtctgctggatatccaagacacccgcctgcgcctgatggatgcgcacggcatcgaaacgatgattctgtccctggctgcaccggctgttcaggcgattccggaccgtcgtaaagccattgaaatcgcacgtcgcgctaatgatatgctggcagaagaatgcgctaaacgtccggaccgctttctggcattcgcagcactgccgctgcaggatgtggacgcagctagcgaagaactgcaacgttgtgtcaacgatctgggcttcgtgggtgccctggttaatggctttagccaggaaggcgatggtcaaaccccgctgtattacgacctgccgcagtatcgcccgttctggggtgaagtcgaaaaactggatgtgccgttttatctgcatccgcgtaacccgctgccgcaggattcccgtatctacgacggtcacccgtggctgctgggtccgacctgggcgttcgcccaagaaacggcggtgcatgccctgcgtctgatggcatctggcctgtttgatgaacacccgcgtctgaatattatcctgggtcatatgggcgaaggtctgccgtacatgatgtaccgtatcgatcatcgtatcgcatgggttcacgagccgccgcgttgtccggcaaaacgtcgctttatggactacttcaacgaaaattttcacattaccacgtcaggcaacttccgtacccagacgctgattgatgcaatcctggaaattggtgctgatcgcatcctgttctcgaccgactggccgtttgaaaacattgatcatgccgctgactggtttaatgctacgtctattgccgaagctgaccgtgtcaaaatcggccgcaccaatgcccgtcgtctgttcaaactggatggcgct

SEQ ID NO: 655 - DNA, 984 bp, Artificial Sequence
  synthetic construct; Dicamba decarboxylase variant
atggctcaaggcaaagtggcactggaagaacatttcgcaatcccggaaacgctgcaagactcggcaggcttcgtcccgggcgactactggaaagaactgcagcatcgtctgctggatatccaagacacccgcctgaaactgatggatgcgcacggcatcgaaacgatgattctgtccctggctgcaccggctgttcaggcgattccggaccgtcgtaaagccattgaaatcgcacgtcgcgctaatgatttcctggcagaagaatgcgctaaacgtccggaccgctttctggcattcgcagcactgccgctgcaggatccggacgcagctaccgaagaactgcaacgttgtgtcaacgatctgggcttcgtgggtgccctggttaatggctttagcgtggaaggcgatggtcaaaccccgctgtattacgacctgccgcagtatcgcccgttctggggtgaagtcgaaaaactggatgtgccgttttatctgcatccgcgtaacccgctgccgcaggattcccgtatctacgccggtcacccgtggctgctgggtccgacctgggcgttcgcccaagaaacggcggtgcatgccctgcgtctgatggcatctggcctgtttgatgaacacccgcgtctgaatattatcctgggtcatctgggcgaaggtctgccgtacatgatgtaccgtatcgatcatcgtatcgcatgggttaaactgccgccgcgttatccggcaaaacgtcgctttatggactacttcaacgaaaattttcacattaccacgtcaggcaacttccgtacccagacgctgattgatgcaatcctggaaattggtgctgatcgcatcctgttctcgaccgactggccgtttgaaaacattgatcatgccgctgactggtttaatgctacgtctattgccgaagctgaccgtgtcaaaatcggccgcaccaatgcccgtcgtctgttcaaactggatggtgac

SEQ ID NO: 656 - DNA, 984 bp, Artificial Sequence
  synthetic construct; Dicamba decarboxylase variant
atggctcaaggcaaagtggcactggaagaacatttcgcaatcccggaaacgctgcaagactcggcaggcttcgtcccgggcgactactggaaagaactgcagcatcgtctgctggatatccaagacacccgcctgaaactgatggatgcgcacggcatcgaaacgatgattctgtccctggctgcaccgggtgttcaggcgattccggaccgtcgcaaagccattgaaatcgcacgtcgcgctaatgatttcctggcagaagaatgcgctaaacgtccggaccgctttctggcattcgcagcactgccgctgcaggatccggacgcagctaccgaagaactgcaacgttgtgtcaacgatctgggcttcgtgggtgccctggttaatggctttagccaggaaggcgatggtcaaaccccgctgtattacgacctgccgcagtatcgcccgttctggggtgaagtcgaaaaactggatgtgccgttttatctgcatccgcgtaacccgctgccgcaggattcccgtatctacgacggtcacccgtggctgctgggtccgacctgggcgttcgcccaagaaacggcggtgcatgccctgcgtctgatggcatctggcctgtttgatgaacacccgcgtctgaatattatcctgggtcatatgggcgaaggtctgccgtacatgatgtaccgtatcgatcatcgtatcgcatgggttcacgagccgccgcgttatccggcaaaacgtcgctttatggactacttcaacgaaaattttcacattaccacgtcaggcaacttccgtacccagacgctgattgatgcaatcctggaaattggtgctgatcgcatcctgttctcgaccgactggccgtttgaaaacattgatcatgccgctgactggtttaatgctacgtctattgccgaagctgaccgtctgaaaatcggccgcaccaatgcccgtcgtctgttcaaactggatctggac

SEQ ID NO: 657 - DNA, 984 bp, Artificial Sequence
  synthetic construct; Dicamba decarboxylase variant
atggctcaaggcaaagtggcactggaagaacatttcgcaatcccggaaacgctgcaagactcggcaggcttcgtcccgggcgactactggaaagaactgcagcatcgtctgctggatatccaagacacccgcctgaaactgatggatgcgcacggcatcgagacgatgattctgtccctggctgcaccggctgttcaggcgattccggaccgtcgcaaagccattgaaatcgcacgtcgcgctaatgatttcctggcagaagaatgcgctaaacgtccggaccgctttctggcattcgcagcactgccgctgcaggatccggacgcagctaccgaagaactgcaacgttgtgtcaacgatctgggcttcgtgggtgccctggttaatggctttagcgtggaaggcgatggtcaaaccccgctgtattacgacctgccgcagtatcgcccgttctggggtgaagtcgaaaaactggatgtgccgttttatctgcatccgcgtaacccgctgccgcaggattcccgtatctacgacggtcacccgtggctgctgggtccgacctgggcgttcgcccaagaaacggcggtgcatgccctgcgtctgatggcatctggcctgtttgatgaacacccgcgtctgaatattatcctgggtcatatgggcgaaggtctgccgtacatgatgtaccgtatcgatcatcgtatcgcatgggttcacgagccgccgcgttatccggcaaaacgtcgctttatggactacttcctggaaaattttcacattaccacgtcaggcaacttccgtacccagacgctgattgatgcaatcctggaaattggtgctgatcgcatcctgttctcgaccgactggccgtttgaaaacattgatcatgccgctgactggtttaatgctacgtctattgccgaagctgaccgtctgaaaatcggccgcaccaatgcccgtcgtctgttcaaactggatggcgct

SEQ ID NO: 658 - DNA, 984 bp, Artificial Sequence
  synthetic construct; Dicamba decarboxylase variant
atggctcaaggcaaagtggcactggaagaacatttcgcaatcccggaaacgctgcaagactcggcaggcttcgtcccgggcgactactggaaagaactgcagcatcgtctgctggatatccaagacacccgcctgaaactgatggatgcgcacggcatcgaaacgatgattctgtccctggctgcaccggctgttcaggcgattccggaccgtgtaaaagccattgaaatcgcacgtcgcgctaatgatatgctggcagaagaatgcgctaaacgtccggaccgctttctggcattcgcagcactgccgctgcaggatccggacgcagctaccgaagaactgcaacgtaccgtcaacgatctgggcttcgtgggtgccctggttaatggctttagccaggaaggcgatggtcaaaccccgctgtattacgacctgccgcagtatcgcccgttctggggtgaagtcgaaaaactggatgtgccgttttatctgcatccgcgtaacccgctgccgcaggattcccgtatctacgacggtcacccgtggctgctgggtccgacctgggcgttcgcccaagaaacggcggtgcatgccctgcgtctgatggcatctggcctgtttgatgaacacccgcgtctgaatattatcctgggtcatatgggcgaaggtctgccgtacatgatgtaccgtatcgatcatcgtatcgcatgggttcacgagccgccgcgttatccggcaaaacgtcgctttatggactacttcaacgaaaattttcacattaccacgtcaggcaacttccgtacccagacgctgattgatgcaatcctggaaattggtgctgatcgcatcctgttctcgaccgactggccgtttgaaaacattgatcatgccgctgactggtttaatgctacgtctattgccgaagctgaccgtctgaaaatcggccgcaccaatgcccgtcgtctgttcaaactggatggtgac

SEQ ID NO: 659 - DNA, 984 bp, Artificial Sequence
  synthetic construct; Dicamba decarboxylase variant
atggctcaaggcaaagtggcactggaagaacatttcgcaatcccggaaacgctgaacgactcggcaggcttcgtcccgggcgactactggaaagaactgcagcatcgtctgctggatatccaagacacccgcctgaaactgatggatgcgcacggcatcgaaacgatgattctgtccctggctgcaccggctgttcaggcgattccggaccgtcgcaaagccattgaaatcgcacgtcgcgctaatgatttcctggcagaagaatgcgctaaacgtccggaccgctttctggcattcgcagcactgccgctgcaggatccggacgcagctaccgaagaactgcaacgttgtgtcaacgatctgggcttcgtgggtgccctggttaatggctttagccaggaaggcgatggtcaaaccccgctgtattacgacctgccgcagtatcgcccgttctggggtgaagtcgaaaaactggatgtgccgttttatctgcatccgcgtaacccgctgccgcaggattcccgtatctacgacggtcacccgtggctgctgggtccgacctgggcgttcgcccaagaaacggcggtgcatgccctgcgtctgatggcatctggcctgtttgatgaacacccgcgtctgaatattatcctgggtcatatgggcgaaggtctgccgtacatgatgtaccgtatcgatcatcgtatcgcatgggttcacgagccgccgcgttatccggcaaaacgtcgctttatggactacttcaacgaaaattttcacattaccacgtcaggcaacttccgtacccagacgctgattgatgcaatcctggaaattggtgctgatcgcatcctgttctcgaccgactggccgtttgaaaacattgatcatgccgctgcctggtttaatgctacgtctattgccgaagctgaccgtgtcaaaatcggccgcaccaatgcccgtcgtctgttcaaactggatggtgac

SEQ ID NO: 660 - DNA, 984 bp, Artificial Sequence
  synthetic construct; Dicamba decarboxylase variant
atggctcaaggcaaagtggcactggaagaacatttcgcaatcccggaaacgctgcaagactcggcaggcttcgtcccgggcgactactggaaagaactgcagcatcgtctgctggatatccaagacacccgcctgaaactgatggatgcgcacggcatcgaaacgatgattctgtccctggctgcaccggctgttcaggcgatcccggaccgtcgcaaagccattgaaatcgcacgtcgcgctaatgatttcctggcagaagaatgcgctaaacgtccggaccgctttctggcattcgcagcactgccgatgcaggatgtggacgcagctagcgaagaactgcaacgttgtgtcaacgatctgggcttcgtgggtgccctggttaatggctttagccaggaaggcgatggtcaaaccccgctgtattacgacctgccgcagtatcgcccgttctggggtgaagtcgaaaaactggatgtgccgttttatctgcatccgcgtaacccgctgccgcaggattcccgtatctacgacggtcacccgtggctgctgggtccgacctgggcgttcgcccaagaaacggcggtgcatgccctgcgtctgatggcatctggcctgtttgatgaacacccgcgtctgaatattatcctgggtcatctgggcgaaggtctgccgtacatgatgtaccgtatcgatcatcgtatcgcatgggttcacgagccgccgcgttatccggcaaaacgtcgctttatggactacttcaacgaaaattttcacattaccacgtcaggcaacttccgtacccagacgctgattgatgcaatcctggaaattggtgctgatcgcatcctgttctcgaccgactggccgtttgaaaacattgatcatgccgctgcctggtttaatgctacgtctattgccgaagctgaccgtctgaaaatcggccgcaccaatgcccgtcgtctgttcaaactggatctggac

SEQ ID NO: 661 - DNA, 984 bp, Artificial Sequence
  synthetic construct; Dicamba decarboxylase variant
atggctcaaggcaaagtggcactggaagaacatttcgcaatcccggaaacgctgcaagactcggcaggcttcgtcccgggcgactactggaaagaactgcagcatcgtctgctggatatccaagacacccgcctgaaactgatggatgcgcacggcatcgaaacgatgattctgtccctggctgcaccggctgttcaggcgattccggaccgtcgcaaagccattgaaatcgcacgtcgcgctaatgatttcctggcagaagaatgcgctaaacgtccggaccgctttctggcattcgcagcactgccgctgcaggatccggacgcagctaccgaagaactgcaacgttgtgtcaacgatctgggcttcgtgggtgccctggttaatggctttagcgtggaaggcgatggtcaaaccccgctgtattacgacctgccgcagtatcgcccgttctggggtgaagtcgaaaaactggatgtgccgttttatctgcatccgcgtaacccgctgccgcaggattcccgtatctacgacggtcacccgtggctgctgggtccgacctgggcgttcgcccaagaaacggcggtgcatgccctgcgtctgatggcatctggcctgtttgatgaacacccgcgtctgaatattatcctgggtcatatgggcgaaggtctgccgtacatgatgtaccgtatcgatcatcgtatcgcatgggttcacgagccgccgcgttatccggcaaaacgtcgctttatggactacttcaacgaaaattttcacattaccacgtcaggcaacttccgtacccagacgctgattgatgcaatcctggaaattggtgctgatcgcatcctgttctcgaccgactggccgtttgaaaacattgatcatgccgctgcctggtttaatgctacgtctattgccgaagctgaccgtgtcaaaatcggccgcaccaatgcccgtcgtctgttcaaactggatctggac

SEQ ID NO: 662 - DNA, 984 bp, Artificial Sequence
  synthetic construct; Dicamba decarboxylase variant
atggctcaaggcaaagtggcactggaagaacatttcgcaatcccggagacgctgcaagactcggcaggcttcgtcccgtctgattacctgaaagaactgcagcatcgtctgctggatatccaagacacccgcctgaaactgatggatgcgcacggcatcgaaacgatgattctgtccctggctgcaccggctgttcaggcgattccggaccgtcgcaaagccattgaaatcgcacgtcgcgctaatgatttcctggcagaagaatgcgctaaacgtccggaccgctttctggcattcgcagcactgccgctgcaggatccggacgcagctaccgaagaactgcaacgttgtgtcaacgatctgggcttcgtgggtgccctggttaatggctttagcgtggaaggcgatggtcaaaccccgctgtattacgacctgccgcagtatcgcccgttctggggtgaagtcgaaaaactggatgtgccgttttatctgcatccgcgtaacccgctgccgcaggattcccgtatctacgacggtcacccgtggctgctgggtccgacctgggcgttcgcccaagaaacggcggtgcatgccctgcgtctgatggcatctggcctgtttgatgaacacccgcgtctgaatattatcctgggtcatctgggcgaaggtctgccgtacatgatgtaccgtatcgatcatcgtatcgcatgggttcacgagccgccgcgttatccggcaaaacgtcgctttatggactacttcaacgaaaattttcacattaccacgtcaggcaacttccgtacccagacgctgattgatgcaatcctggaaattggtgctgatcgcatcctgttctcgaccgactggccgtttgaaaacattgatcatgccgctgactggtttaatgctacgtctattgccgaagctgaccgtctgaaaatcggccgcaccaatgcccgtcgtctgttcaaactggatctggac

SEQ ID NO: 663 - DNA, 984 bp, Artificial Sequence
  synthetic construct; Dicamba decarboxylase variant
atggctcaaggcaaagtggcactggaagaacatttcgcaatcccggagacgctgaacgactcggcaggcttcgtcccgggcgactactggaaagaactgcagcatcgtctgctggatatccaagacacccgcctgaaactgatggatgcgcacggcatcgaaacgatgattctgtccctggctgcaccggctgttcaggcgattccggaccgtcgcaaagccattgaaatcgcacgtcgcgctaatgatttcctggcagaagaatgcgctaaacgtccggaccgctttctggcattcgcagcactgccgctgcaggatccggacgcagctaccgaagaactgcaacgtaccgtcaacgacctgggcttcgtgggtgccctggttaatggctttagcgtggaaggcgatggtcaaaccccgctgtattacgacctgccgcagtatcgcccgttctggggtgaagtcgaaaaactggatgtgccgttttatctgcatccgcgtaacccgctgccgcaggattcccgtatctacgacggtcacccgtggctgctgggtccgacctgggcgttcgcccaagaaacggcggtgcatgccctgcgtctgatggcatctggcctgtttgatgaacacccgcgtctgaatattatcctgggtcatatgggcgaaggtctgccgtacatgatgtaccgtatcgatcatcgtatcgcatgggttcacgagccgccgcgttatccggcaaaacgtcgctttatggactacttcaacgaaaattttcacattaccacgtcaggcaacttccgtacccagacgctgattgatgcaatcctggaaattggtgctgatcgcatcctgttctcgaccgactggccgtttgaaaacattgatcatgccgctgactggtttaatgctacgtctattgccgaagctgaccgtgtcaaaatcggccgcaccaatgcccgtcgtctgttcaaactggatggtgac

SEQ ID NO: 664 - DNA, 984 bp, Artificial Sequence
  synthetic construct; Dicamba decarboxylase variant
atggctcaaggcaaagtggcactggaagaacatttcgcaatcccggaaacgctgcaagactcggcaggcttcgtcccgggcgactactggaaagaactgcagcatcgtctgctggatatccaagacacccgcctgaaactgatggatgcgcacggcatcggcacgatgattctgtccctggctgcaccggctgttcaggcgattccggaccgtcgcaaagccattgaaatcgcacgtcgcgctaatgatttcctggcagaagaatgcgctaaacgtccggaccgctttctggcattcgcagcactgccgctgcaggatccggacgcagctaccgaagaactgcaacgttgtgtcaacgatctgggcttcgtgggtgccctggttaatggctttagcgtggaaggcgatggtcaaaccccgctgtattacgacctgccgcagtatcgcccgttctggggtgaagtcgaaaaactggatgtgccgttttatctgcatccgcgtaacccgctgccgcaggattcccgtatctacgacggtcacccgtggctgctgggtccgacctgggcgttcgcccaagaaacggcggtgcatgccctgcgtctgatggcatctggcctgtttgatgaacacccgcgtctgaatattatcctgggtcatatgggcgaaggtctgccgtacatgatgtaccgtatcgatcatcgtatcgcatgggttaaactgccgccgcgttatccggcaaaacgtcgctttatggactacttcaacgaaaattttcacattaccacgtcaggcaacttccgtacccagacgctgattgatgcaatcctggaaattggtgctgatcgcatcctgttctcgaccgactggccgtttgaaaacattgatcatgccgctgactggtttaatgctacgtctattgccgaagctgaccgtgtcaaaatcggccgcaccaatgcccgtcgtctgttcaaactggatggtgac

SEQ ID NO: 665 - DNA, 984 bp, Artificial Sequence
  synthetic construct; Dicamba decarboxylase variant
atggctcaaggcaaagtggcactggaagaacatttcgcaatcccggagacgctgcaggactcggcaggcttcgtcccgggcgactactggaaagaactgcagcatcgtctgctggatatccaagacacccgcctgaaactgatggatgcgcacggcatcgaaacgatgattctgtccctggctgcaccggctgttcaggcgattccggaccgtgtacaagccattgaaatcgcacgtcgcgctaatgatttcctggcagaagaatgcgctaaacgtccggaccgcttcctggcattcgcagcactgccgctgcaggatccggacgcagctaccgaagaactgcaacgttgtgtcaacgatctgggcttcgtgggtgccctggttaatggctttagccaggaaggcgatggtcaaaccccgctgtattacgacctgccgcagtatcgcccgttctggggtgaagtcgaaaaactggatgtgccgttttatctgcatccgcgtaacccgctgccgcaggattcccgtatctacgacggtcacccgtggctgctgggtccgacctgggcgttcgcccaagaaacggcggtgcatgccctgcgtctgatggcatctggcctgtttgatgaacacccgcgtctgaatattatcctgggtcatctgggcgaaggtctgccgtacatgatgtaccgtatcgatcatcgtatcgcatgggttaaactgccgccgcgttatccggcaaaacgtcgctttatggactacttcaacgaaaattttcacattaccacgtcaggcaacttccgtacccagacgctgattgatgcaatcctggaaattggtgctgatcgcatcctgttctcgaccgactggccgtttgaaaacattgatcatgccgctgactggtttaatgctacgtctattgccgaagctgaccgtgtcaaaatcggccgcaccaatgcccgtcgtctgttcaaactggatggtgac

SEQ ID NO: 666 - DNA, 984 bp, Artificial Sequence
  synthetic construct; Dicamba decarboxylase variant
atggctcaaggcaaagtggcactggaagaacatttcgcaatcccggaaacgctgcaagactcggcaggcttcgtcccgtgtgattactggaaagaactgcagcatcgtctgctggatatccaagacacccgcctgcacctgatggatgcgcacggcatcgaaacgatgattctgtccctggctgcaccggctgttcaggcgattccggaccgtcgcaaagccattgaaatcgcacgtcgcgctaatgatttcctggcagaagaatgcgctaaacgtccggaccgctttctggcattcgcagcactgccgctgcaggatccggacgcagctaccgaagaactgcaacgttgtgtcaacgatctgggcttcgtgggtgccctggttaatggctttagccaggaaggcgatggtcaaaccccgctgtattacgacctgccgcagtatcgcccgttctggggtgaagtcgaaaaactggatgtgccgttttatctgcatccgcgtaacccgctgccgcaggattcccgtatctacgacggtcacccgtggctgctgggtccgacctgggcgttcgcccaagaaacggcggtgcatgccctgcgtctgatggcatctggcctgtttgatgaacacccgcgtctgaatattatcctgggtcatctgggcgaaggtctgccgtacatgatgtaccgtatcgatcatcgtatcgcatgggttcaacagccgccgcgttatccggcaaaacgtcgctttatggactacttcaacgaaaattttcacattaccacgtcaggcaacttccgtacccagacgctgattgatgcaatcctggaaattggtgctgatcgcatcctgttctcgaccgactggccgtttgaaaacattgatcatgccactgactggtttaatgctacgtctattgccgaagctgaccgtgtcaaaatcggccgcaccaatgcccgtcgtctgttcaaactggatggcgct

SEQ ID NO: 667 - DNA, 984 bp, Artificial Sequence
  synthetic construct; Dicamba decarboxylase variant
atggctcaaggcaaagtggcactggaagaacatttcgcaatcccggaaacgctgcaagactcggcaggcttcgtcccgtctgattacctgaaagaactgcagcatcgtctgctggatatccaagacacccgcctgaaactgatggatgcgcacggcatcgaaacgatgattctgtccctggctgcaccggctgttcaggcgattccggaccgtcgcaaagccattgaaatcgcacgtcgcgctaatgatttcctggcagaagaatgcgctaaacgtccggaccgctttctggcattcgcagcactgccgatgcaggatgtggacgcagctaccgaagaactgcaacgttgtgtcaacactctgggcttcgtgggtgccctggttaatggctttagccaggaaggcgatggtcaaaccccgctgtattacgacctgccgcagtatcgcccgttctggggtgaagtcgaaaaactggatgtgccgttttatctgcatccgcgtaacccgctgccgcaggattcccgtatctacgacggtcacccgtggctgctgggtccgacctgggcgttcgcccaagaaacggcggtgcatgccctgcgtctgatggcatctggcctgtttgatgaacacccgcgtctgaatattatcctgggtcatatgggcgaaggtctgccgtacatgatgtaccgtatcgatcatcgtatcgcatgggttcacgagccgccgcgttatccggcaaaacgtcgctttatggactacttcaacgaaaattttcacattaccacgtcaggcaacttccgtacccagacgctgattgatgcaatcctggaaattggtgctgatcgcatcctgttctcgaccgactggccgtttgaaaacattgatcatgccgctgactggtttaatgctacgtctattgccgaagctgaccgtctgaaaatcggccgcaccaatgcccgtcgtctgttcaaactggatggcgct

SEQ ID NO: 668 - DNA, 984 bp, Artificial Sequence
  synthetic construct; Dicamba decarboxylase variant
atggctcaaggcaaagtggcactggaagaacatttcgcaatcccggaaacgctgcaagactcggcaggcttcgtcccgggcgactactggaaagaactgcagcatcgtctgctggatatccaagacacccgcctgaaactgatggatgcgcacggcatcggaacgatgattctgtccctggctgcaccggctgttcaggcgattccggaccgtcgcaaagccattgaaatcgcacgtcgcgctaatgatttcctggcagaagaatgcgctaaacgtccggaccgctttctggcattcgcagcactgccgctgcaggatccggacgcagctaccgaagaactgcaacgttgtgtcaacgatctgggcttcgtgggtgccctggttaatggctttagccaggaaggcgatggtcaaaccccgctgtattacgacctgccgcagtatcgcccgttctggggtgaagtcgaaaaactggatgtgccgttttatctgcatccgcgtaacccgctgccgcaggattcccgtatctacgacggtcacccgtggctgctgggtccgacctgggcgttcgcccaagaaacggcggtgcatgccctgcgtctgatggcatctggcctgtttgatgaacacccgcgtctgaatattatcctgggtcatatgggcgaaggtctgccgtacatgatgtaccgtatcgatcatcgtatcgcatgggttcacgagccgccgcgttatccggcaaaacgtcgctttatggactacttcaacgaaaattttcacattaccacgtcaggcaacttccgtacccagacgctgattgatgcaatcctggaaattggtgctgatcgcatcctgttctcgaccgactggccgtttgaaaacattgatcatgccgctgactggtttaatgctacgtctattgccgaagctgaccgtgtcaaaatcggccgcaccaatgcccgtcgtctgttcaaactggatggcgct

SEQ ID NO: 669 - DNA, 984 bp, Artificial Sequence
  synthetic construct; Dicamba decarboxylase variant
atggctcaaggcaaagtggcactggaagaacatttcgcaatcccggaaacgctgcaagactcggcaggcttcgtcccgggcgactactggaaagaactgcagcatcgtctgctggatatccaagacacccgcctgaaactgatggatgcgcaccaaatcgagacgatgattctgtccctggctgcaccggctgttcaggcgattccggaccgtcgcaaagccattgaaatcgcacgtcgcgctaatgatttcctggcagaagaatgcgctaaacgtccggaccgctttctggcattcgcagcactgccgctgcaggatccggacgcagctaccgaagaactgcaacgttgcgtcaacgacctgggcttcgtgggtgccctggttaatggctttagccaggaaggcgatggtcaaaccccgctgtattacgacctgccgcagtatcgcccgttctggggtgaagtcgaaaaactggatgtgccgttttatctgcatccgcgtaacccgctgccgcaggattcccgtatctacgacggtcacccgtggctgctgggtccgacctgggcgttcgcccaagaaacggcggtgcatgccctgcgtctgatggcatctggcctgtttgatgaacacccgcgtctgaatattatcctgggtcatatgggcgaaggtctgccgtacatgatgtaccgtatcgatcatcgtatcgcatgggttaaactgccgccgcgttatccggcaaaacgtcgctttatggactacttcaacgaaaattttcacattaccacgtcaggcaacttccgtacccagacgctgattgatgcaatcctggaaattggtgctgatcgcatcctgttctcgaccgactggccgtttgaaaacattgatcatgccgctgactggtttaatgctacgtctattgccgaagctgaccgtctgaaaatcggccgcaccaatgcccgtcgtctgttcaaactggatggtgac

SEQ ID NO: 670 - DNA, 984 bp, Artificial Sequence
  synthetic construct; Dicamba decarboxylase variant
atggctcaaggcaaagtggcactggaagaacatttcgcaatcccggagacgctgcaggactcggcaggcttcgtcccgggcgactactggaaagaactgcagcatcgtctgctggatatccaagacacccgcctgaaactgatggatgcgcacggcatcgaaacgatgattctgtccctggctgcaccggctgttcaggcgattccggaccgtcgcaaagccattgaaatcgcacgtcgcgctaatgatttcctggcagaagaatgcgctaaacgtccggaccgctttctggcattcgcagcactgccgctgcaggatccggacgcagctaccgaagaactgcaacgttgtgtcaacgatctgggcttcgtgggtgccctggttaatggctttagccaggaaggcgatggtcaaaccccgctgtattacgacctgccgcagtatcgcccgttctggggtgaagtcgaaaaactggatgtgccgttttatctgcatccgcgtaacccgctgccgcaggattcccgtatctacgacggtcacccgtggctgctgggtccgacctgggcgttcgcccaagaaacggcggtgcatgccctgcgtctgatggcatctggcctgtttgatgaacacccgcgtctgaatattatcctgggtcatatgggcgaaggtctgccgtacatgatgtaccgtatcgatcatcgtatcgcatgggttcacgagccgccgcgttatccggcaaaacgtcgctttatggactacttcaacgaaaattttcacattaccacgtcaggcaacttccgtacccagacgctgattgatgcaatcctggaaattggtgctgatcgcatcctgttctcgaccgactggccgtttgaaaacattgatcatgccgctgcctggtttaatgctacgtctattgccgaagctgaccgtgtcaaaatcggccgcaccaatgcccgtcgtctgttcaaactggatggcgct

SEQ ID NO: 671 - DNA, 984 bp, Artificial Sequence
  synthetic construct; Dicamba decarboxylase variant
atggctcaaggcaaagtggcactggaagaacatttcgcaatcccggaaacgctgcaagactcggcaggcttcgtcccgtctgattacctgaaagaactgcagcatcgtctgctggatatccaagacacccgcctgaaactgatggatgcgcacggcatcgaaacgatgattctgtccctggctgcaccggctgttcaggcgattccggaccgtcgcaaagccattgaaatcgcacgtcgcgctaatgatttcctggcagaagaatgcgctaaacgtccggaccgctttctggcattcgcagcactgccgatgcaggatccggacgcagctaccgaagaactgcaacgtaccgtcaacgacctgggcttcgtgggtgccctggttaatggctttagcgtggaaggcgatggtcaaaccccgctgtattacgacctgccgcagtatcgcccgttctggggtgaagtcgaaaaactggatgtgccgttttatctgcatccgcgtaacccgctgccgcaggattcccgtatctacgacggtcacccgtggctgctgggtccgacctgggcgttcgcccaagaaacggcggtgcatgccctgcgtctgatggcatctggcctgtttgatgaacacccgcgtctgaatattatcctgggtcatatgggcgaaggtctgccgtacatgatgtaccgtatcgatcatcgtatcgcatgggttcacgagccgccgcgttatccggcaaaacgtcgctttatggactacttcaacgaaaattttcacattaccacgtcaggcaacttccgtacccagacgctgattgatgcaatcctggaaattggtgctgatcgcatcctgttctcgaccgactggccgtttgaaaacattgatcatgccgctgactggtttaatgctacgtctattgccgaagctgaccgtgtcaaaatcggccgcaccaatgcccgtcgtctgttcaaactggatggtgac

SEQ ID NO: 672 - DNA, 984 bp, Artificial Sequence
  synthetic construct; Dicamba decarboxylase variant
atggctcaaggcaaagtggcactggaagaacatttcgcaatcccggaaacgctgcaagactcggcaggcttcgtcccgggcgactactggaaagaactgcagcatcgtctgctggatatccaagacacccgcctgaaactgatggatgcgcacggcatcgaaacgatgattctgtccctggctgcaccggctgttcaggcgattccggaccgtcgcaaagccattgaaatcgcacgtcgcgctaatgatttcctggcagaagaatgcgctaaacgtccggaccgctttctggcattcgcagcactgccgctgcaggatccggacgcagctaccgaagaactgcaacgttgtgtcaacgatctgggcttcgtgggtgccctggttaatggctttagccaggaaggcgatggtcaaaccccgctgtattacgacctgccgcagtatcgcccgttctggggtgaagtcgaaaaactggatgtgccgttttatctgcatccgcgtaacccgctgccgcaggattcccgtatctacgacggtcacccgtggctgctgggtccgacctgggcgttcgcccaagaaacggcggtgcatgccctgcgtctgatggcatctggcctgtttgatgaacacccgcgtctgaatattatcctgggtcatatgggcgaaggtctgccgtacatgatgtaccgtatcgatcatcgtatcgcatgggttcacgagccgccgcgttatccggcaaaacgtcgctttatggactacttcaacgaaaattttcacattaccacgtcaggcaacttccgtacccagacgctgattgatgcaatcctggaaattggtgctgatcgcatcctgttctcgaccgactggccgtttgaaaacattgatcatgccgctgactggtttaatgctacgtctattgccgaagctgaccgtgtcaaaatcggccgcaccaatgcccgtcgtctgttcaaactggatggtgac

SEQ ID NO: 673 - DNA, 984 bp, Artificial Sequence
  synthetic construct; Dicamba decarboxylase variant
atggctcaaggcaaagtggcactggaagaacatttcgcaatcccggaaacgctgcaagactcggcaggcttcgtcccgtctgaatacctgaaagaactgcagcatcgtctgctggatatccaagacacccgcctgaaactgatggatgcgcacggcatcgaaacgatgattctgtccctggctgcaccggctgttcaggcgattccggaccgtcgcaaagccattgaaatcgcacgtcgcgctaatgatttcctggcagaagaatgcgctaaacgtccggaccgctttctggcattcgcagcactgccgatgcaggatgtggacgcagctagcgaagaactgcaacgttgcgtcaacactctgggcttcgtgggtgccctggttaatggctttagccaggaaggcgatggtcaaaccccgctgtattacgacctgccgcagtatcgcccgttctggggtgaagtcgaaaaactggatgtgccgttttatctgcatccgcgtaacccgctgccgcaggattcccgtatctacgacggtcacccgtggctgctgggtccgacctgggcgttcgcccaagaaacggcggtgcatgccctgcgtctgatggcatctggcctgtttgatgaacacccgcgtctgaatattatcctgggtcatatgggcgaaggtctgccgtacatgatgtaccgtatcgatcatcgtatcgcatgggttcacgagccgccgcgttatccggcaaaacgtcgctttatggactacttcaacgaaaattttcacattaccacgtcaggcaacttccgtacccagacgctgattgatgcaatcctggaaattggtgctgatcgcatcctgttctcgaccgactggccgtttgaaaacattgatcatgccgctgactggtttaatgctacgtctattgccgaagctgaccgtgtcaaaatcggccgcaccaatgcccgtcgtctgttcaaactggatctggac

SEQ ID NO: 674 - DNA, 984 bp, Artificial Sequence
  synthetic construct; Dicamba decarboxylase variant
atggctcaaggcaaagtggcactggaagaacatttcgcaatcccggagacgctgaacgactcggcaggcttcgtcccgggcgactactggaaagaactgcagcatcgtctgctggatatccaagacacccgcctgaaactgatggatgcgcacggcatcgaaacgatgattctgtccctggctgcaccggctgttcaggcgattccggaccgtgtaaaagccattgaaatcgcacgtcgcgctaatgatttcctggcagaagaatgcgctaaacgtccggaccgctttctggcattcgcagcactgccgctgcaggatccggacgcagctaccgaagaactgcaacgttgcgtcaacactctgggcttcgtgggtgccctggttaatggctttagccaggaaggcgatggtcaaaccccgctgtattacgacctgccgcagtatcgcccgttctggggtgaagtcgaaaaactggatgtgccgttttatctgcatccgcgtaacccgctgccgcaggattcccgtatctacgacggtcacccgtggctgctgggtccgacctgggcgttcgcccaagaaacggcggtgcatgccctgcgtctgatggcatctggcctgtttgatgaacacccgcgtctgaatattatcctgggtcatatgggcgaaggtctgccgtacatgatgtaccgtatcgatcatcgtatcgcatgggttcacgagccgccgcgttatccggcaaaacgtcgctttatggactacttcaacgaaaattttcacattaccacgtcaggcaacttccgtacccagacgctgattgatgcaatcctggaaattggtgctgatcgcatcctgttctcgaccgactggccgtttgaaaacattgatcatgccgctgactggtttaatgctacgtctattgccgaagctgaccgtgtcaaaatcggccgcaccaatgcccgtcgtctgttcaaactggatggtgac

SEQ ID NO: 675 - DNA, 984 bp, Artificial Sequence
  synthetic construct; Dicamba decarboxylase variant
atggctcaaggcaaagtggcactggaagaacatttcgcaatcccggaaacgctgcaagactcggcaggcttcgtcccgggcgactactggaaagaactgcagcatcgtctgctggatatccaagacacccgcctgaaactgatggatgcgcacggcatcgaaacgatgattctgtccctggctgcaccggctgttcaggcgattccggaccgtcgcaaagccattgaaatcgcacgtcgcgctaatgatttcctggcagaagaatgcgctaaacgtccggaccgctttctggcattcgcagcactgccgctgcaggatccggacgcagctaccgaagaactgcaacgttgtgtcaacactctgggcttcgtgggtgccctggttaatggctttagccaggagggcgatggtcaaaccccgctgtattacgacctgccgcagtatcgcccgttctggggtgaagtcgaaaaactggatgtgccgttttatctgcatccgcgtaacccgctgccgcaggattcccgtatctacgacggtcacccgtggctgctgggtccgacctgggcgttcgcccaagaaacggcggtgcatgccctgcgtctgatggcatctggcctgtttgatgaacacccgcgtctgaatattatcctgggtcatatgggcgaaggtctgccgtacatgatgtaccgtatcgatcatcgtatcgcatgggttaaactgccgccgcgttatccggcaaaacgtcgctttatggactacttcaacgaaaattttcacattaccacgtcaggcaacttccgtacccagacgctgattgatgcaatcctggaaattggtgctgatcgcatcctgttctcgaccgactggccgtttgaaaacattgatcatgccgctgactggtttaatgctacgtctattgccgaagctgaccgtctgaaaatcggccgcaccaatgcccgtcgtctgttcaaactggatggtgac

SEQ ID NO: 676 - DNA, 984 bp, Artificial Sequence
  synthetic construct; Dicamba decarboxylase variant
atggctcaaggcaaagtggcactggaagaacatttcgcaatcccggaaacgctgcaagactcggcaggcttcgtcccgggcgactactggaaagaactgcagcatcgtctgctggatatccaagacacccgcctgcgcctgatggatgcgcacggcatcgaaacgatgattctgtccctggctgcgccggctgttcaggcgattccggaccgtcgcaaagccattgaaatcgcacgtcgcgctaatgatttcctggcagaagaatgcgctaaacgtccggaccgctttctggcattcgcagcactgccgctgcaggacccggacgcagctaccgaagaactgcaacgtaccgtcaacactctgggcttcgtgggtgccctggttaatggctttagccaggaaggcgatggtcaaaccccgctgtattacgacctgccgcagtatcgcccgttctggggtgaagtcgaaaaactggatgtgccgttttatctgcatccgcgtaacccgctgccgcaggattcccgtatctacgacggtcacccgtggctgctgggtccgacctgggcgttcgcccaagaaacggcggtgcatgccctgcgtctgatggcatctggcctgtttgatgaacacccgcgtctgaatattatcctgggtcatctgggcgaaggtctgccgtacatgatgtaccgtatcgatcatcgtatcgcatgggttcacgagccgccgcgttatccggcaaaacgtcgctttatggactacttcaacgaaaattttcacattaccacgtcaggcaacttccgtacccagacgctgattgatgcaatcctggaaattggtgctgatcgcatcctgttctcgaccgactggccgtttgaaaacattgatcatgccgctgactggtttaatgctacgtctattgccgaagctgaccgtgtcaaaatcggccgcaccaatgcccgtcgtctgttcaaactggatggcgct

SEQ ID NO: 677 - DNA, 984 bp, Artificial Sequence
  synthetic construct; Dicamba decarboxylase variant
atggctcaaggcaaagtggcactggaagaacatttcgcaatcccggaaacgctgcaagactcggcaggcttcgtcccgtctgaatacctgaaagaactgcagcatcgtctgctggatatccaagacacccgcctgaaactgatggatgcgcacggcatcgaaacgatgattctgtccctggctgcaccggctgttcaggcgattccggaccgtcgcaaagccattgaaatcgcacgtcgcgctaatgatttcctggcagaagaatgcgctaaacgtccggaccgctttctggcattcgcagcactgccgctgcaggatccggacgcagctaccgaagaactgcaacgttgtgtcaacgatctgggcttcgtgggtgccctggttaatggctttagcgtggaaggcgatggtcaaaccccgctgtattacgacctgccgcagtatcgcccgttctggggtgaagtcgaaaaactggatgtgccgttttatctgcatccgcgtaacccgctgccgcaggattcccgtatctacgacggtcacccgtggctgctgggtccgacctgggcgttcgcccaagaaacggcggtgcatgccctgcgtctgatggcatctggcctgtttgatgaacacccgcgtctgaatattatcctgggtcatctgggcgaaggtctgccgtacatgatgtaccgtatcgatcatcgtatcgcatgggttaaactgccgccgcgttatccggcaaaacgtcgctttatggactacttcaacgaaaattttcacattaccacgtcaggcaacttccgtacccagacgctgattgatgcaatcctggaaattggtgctgatcgcatcctgttctcgaccgactggccgtttgaaaacattgatcatgccgctgactggtttaatgctacgtctattgccgaagctgaccgtgtcaaaatcggccgcaccaatgcccgtcgtctgttcaaactggatggtgac

SEQ ID NO: 678 - DNA, 984 bp, Artificial Sequence
  synthetic construct; Dicamba decarboxylase variant
atggctcaaggcaaagtggcactggaagaacatttcgcaatcccggaaacgctgcaagactcggcaggcttcgtcccgggcgactactggaaagaactgcagcatcgtctgctggatatccaagacacccgcctgaaactgatggatgcgcacggcatcgagacgatgattctgtccctggctgcaccggctgttcaggcgattccggaccgtcgcaaagccattgaaatcgcacgtcgcgctaatgatatgctggcagaagaatgcgctaaacgtccggaccgctttctggcattcgcagcactgccgctgcaggatccggacgcagctaccgaagaactgcaacgttgtgtcaacgatctgggcttcgtgggtgccctggttaatggctttagccaggaaggcgatggtcaaaccccgctgtattacgacctgccgcagtatcgcccgttctggggtgaagtcgaaaaactggatgtgccgttttatctgcatccgcgtaacccgctgccgcaggattcccgtatctacgacggtcacccgtggctgctgggtccgacctgggcgttcgcccaagaaacggcggtgcatgccctgcgtctgatggcatctggcctgtttgatgaacacccgcgtctgaatattatcctgggtcatatgggcgaaggtctgccgtacatgatgtaccgtatcgatcatcgtatcgcatgggttaaactgccgccgcgttatccggcaaaacgtcgctttatggactacttcaacgaaaattttcacattaccacgtcaggcaacttccgtacccagacgctgattgatgcaatcctggaaattggtgctgatcgcatcctgttctcgaccgactggccgtttgaaaacattgatcatgccactgcctggtttaatgctacgtctattgccgaagctgaccgtgtcaaaatcggccgcaccaatgcccgtcgtctgttcaaactggatggcgct

SEQ ID NO: 679 - DNA, 984 bp, Artificial Sequence
  synthetic construct; Dicamba decarboxylase variant
atggctcaaggcaaagtggcactggaagaacatttcgcaatcccggaaacgctgcaagactcggcaggcttcgtcccgggcgactactggaaagaactgcagcatcgtctgctggatatccaagacacccgcctgcgcctgatggatgcgcacggcatcgaaacgatgattctgtccctggctgcaccggctgttcaggcgattccggaccgtcgcaaagccattgaaatcgcacgtcgcgctaatgatttcctggcagaagaatgcgctaaacgtccggaccgctttctggcattcgcagcactgccgctgcaggatccggacgcagctaccgaagaactgcaacgttgtgtcaacgatctgggcttcgtgggtgccctggttaatggctttagccaggaaggcgatggtcaaaccccgctgtattacgacctgccgcagtatcgcccgttctggggtgaagtcgaaaaactggatgtgccgttttatctgcatccgcgtaacccgctgccgcaggattcccgtatctacgacggtcacccgtggctgctgggtccgacctgggcgttcgcccaagaaacggcggtgcatgccctgcgtctgatggcatctggcctgtttgatgaacacccgcgtctgaatattatcctgggtcatatgggcgaaggtctgccgtacatgatgtaccgtatcgatcatcgtatcgcatgggttaaactgccgccgcgttatccggcaaaacgtcgctttatggactacttcaacgaaaattttcacattaccacgtcaggcaacttccgtacccagacgctgattgatgcaatcctggaaattggtgctgatcgcatcctgttctcgaccgactggccgtttgaaaacattgatcatgccgctgactggtttaatgctacgtctattgccgaagctgaccgtctgaaaatcggccgcaccaatgcccgtcgtctgttcaaactggatggtgac

SEQ ID NO: 680 - DNA, 984 bp, Artificial Sequence
  synthetic construct; Dicamba decarboxylase variant
atggctcaaggcaaagtggcactggaagaacatttcgcaatcccggaaacgctgcaagactcggcaggcttcgtcccgggcgactactggaaagaactgcagcatcgtctgctggatatccaagacacccgcctgaaactgatggatgcgcacggcatcggcacgatgattctgtccctggctgcaccggctgttcaggcgattccggaccgtcgcaaagccattgaaatcgcacgtcgcgctaatgatatgctggcagaagaatgcgctaaacgtccggaccgctttctggcattcgcagcactgccgctgcaggatccggacgcagctaccgaagaactgcaacgttgtgtcaacgatctgggcttcgtgggtgccctggttaatggctttagcgtggaaggcgatggtcaaaccccgctgtattacgacctgccgcagtatcgcccgttctggggtgaagtcgaaaaactggatgtgccgttttatctgcatccgcgtaacccgctgccgcaggattcccgtatctacgacggtcacccgtggctgctgggtccgacctgggcgttcgcccaagaaacggcggtgcatgccctgcgtctgatggcatctggcctgtttgatgaacacccgcgtctgaatattatcctgggtcatctgggcgaaggtctgccgtacatgatgtaccgtatcgatcatcgtatcgcatgggttcacgagccgccgcgttatccggcaaaacgtcgctttatggactacttcaacgaaaattttcacattaccacgtcaggcaacttccgtacccagacgctgattgatgcaatcctggaaattggtgctgatcgcatcctgttctcgaccgactggccgtttgaaaacattgatcatgccactgactggtttaatgctacgtctattgccgaagctgaccgtctgaaaatcggccgcaccaatgcccgtcgtctgttcaaactggatggcgct

SEQ ID NO: 681 - DNA, 984 bp, Artificial Sequence
  synthetic construct; Dicamba decarboxylase variant
atggctcaaggcaaagtggcactggaagaacatttcgcaatcccggaaacgctgcaagactcggcaggcttcgtcccgggcgactactggaaagaactgcagcatcgtctgctggatatccaagacacccgcctgaaactgatggatgcgcacggcatcgaaacgatgattctgtccctggctgcaccggctgttcaggcgattccggaccgtcgcaaagccattgaaatcgcacgtcgcgctaatgatttcctggcagaagaatgcgctaaacgtccggaccgctttctggcattcgcagcactgccgctgcaggatccggacgcagctaccgaagaactgcaacgttgtgtcaacgatctgggcttcgtgggtgccctggttaatggctttagccaggaaggcgatggtcaaaccccgctgtattacgacctgccgcagtatcgcccgttctggggtgaagtcgaaaaactggatgtgccgttttatctgcatccgcgtaacccgctgccgcaggattcccgtatctacgacggtcacccgtggctgctgggtccgacctgggcgttcgcccaagaaacggcggtgcatgccctgcgtctgatggcatctggcctgtttgatgaacacccgcgtctgaatattatcctgggtcatatgggcgaaggtctgccgtacatgatgtaccgtatcgatcatcgtatcgcatgggttcacgagccgccgcgttatccggcaaaacgtcgctttatggactacttcaacgaaaattttcacattaccacgtcaggcaacttccgtacccagacgctgattgatgcaatcctggaaattggtgctgatcgcatcctgttctcgaccgactggccgtttgaaaacattgatcatgccgctgcctggtttaatgctacgtctattgccgaagctgaccgtctgaaaatcggccgcaccaatgcccgtcgtctgttcaaactggatggtgac

SEQ ID NO: 682 - DNA, 984 bp, Artificial Sequence
  synthetic construct; Dicamba decarboxylase variant
atggctcaaggcaaagtggcactggaagaacatttcgcaatcccggagacgctgcaagactcggcaggcttcgtcccgggcgactactggaaagaactgcagcatcgtctgctggatatccaagacacccgcctgaaactgatggatgcgcacggcatcgaaacgatgattctgtccctggctgcaccggctgttcaggcgattccggaccgtcgcaaagccattgaaatcgcacgtcgcgctaatgatttcctggcagaagaatgcgctaaacgtccggaccgctttctggcattcgcagcactgccgctgcaggatccggacgcagctaccgaagaactgcaacgttgtgtcaacgatctgggcttcgtgggtgccctggttaatggctttagcgtggaaggcgatggtcaaaccccgctgtattacgacctgccgcagtatcgcccgttctggggtgaagtcgaaaaactggatgtgccgttttatctgcatccgcgtaacccgctgccgcaggattcccgtatctacgacggtcacccgtggctgctgggtccgacctgggcgttcgcccaagaaacggcggtgcatgccctgcgtctgatggcatctggcctgtttgatgaacacccgcgtctgaatattatcctgggtcatctgggcgaaggtctgccgtacatgatgtaccgtatcgatcatcgtatcgcatgggttaaactgccgccgcgttatccggcaaaacgtcgctttatggactacttcaacgaaaattttcacattaccacgtcaggcaacttccgtacccagacgctgattgatgcaatcctggaaattggtgctgatcgcatcctgttctcgaccgactggccgtttgaaaacattgatcatgccgctgactggtttaatgctacgtctattgccgaagctgaccgtgtcaaaatcggccgcaccaatgcccgtcgtctgttcaaactggatggtgac

SEQ ID NO: 683 - DNA, 984 bp, Artificial Sequence
  synthetic construct; Dicamba decarboxylase variant
atggctcaaggcaaagtggcactggaagaacatttcgcaatcccggaaacgctgcaagactcggcaggcttcgtcccgggcgactactggaaagaactgcagcatcgtctgctggatatccaagacacccgcctgaaactgatggatgcgcacggcatcgaaacgatgattctgtccctggctgcaccggctgttcaggcgattccggaccgtcgcaaagccattgaaatcgcacgtcgcgctaatgatttcctggcagaagaatgcgctaaacgtccggaccgctttctggcattcgcagcactgccgctgcaggatgtggacgcagctaccgaagaactgcaacgttgcgtcaacgacctgggcttcgtgggtgccctggttaatggctttagccaggaaggcgatggtcaaaccccgctgtattacgacctgccgcagtatcgcccgttctggggtgaagtcgaaaaactggatgtgccgttttatctgcatccgcgtaacccgctgccgcaggattcccgtatctacgacggtcacccgtggctgctgggtccgacctgggcgttcgcccaagaaacggcggtgcatgccctgcgtctgatggcatctggcctgtttgatgaacacccgcgtctgaatattatcctgggtcatatgggcgaaggtctgccgtacatgatgtaccgtatcgatcatcgtatcgcatgggttaaactgccgccgcgttatccggcaaaacgtcgctttatggactacttcaacgaaaattttcacattaccacgtcaggcaacttccgtacccagacgctgattgatgcaatcctggaaattggtgctgatcgcatcctgttctcgaccgactggccgtttgaaaacattgatcatgccactgactggtttaatgctacgtctattgccgaagctgaccgtgtcaaaatcggccgcaccaatgcccgtcgtctgttcaaactggatctggac

SEQ ID NO: 684 - DNA, 984 bp, Artificial Sequence
  synthetic construct; Dicamba decarboxylase variant
atggctcaaggcaaagtggcactggaagaacatttcgcaatcccggaaacgctgcaagactcggcaggcttcgtcccgtctgaatacctgaaagaactgcagcatcgtctgctggatatccaagacacccgcctgaaactgatggatgcgcacggcatcgaaacgatgattctgtccctggctgcaccggctgttcaggcgattccggaccgtcgcaaagccattgaaatcgcacgtcgcgctaatgatttcctggcagaagaatgcgctaaacgtccggaccgctttctggcattcgcagcactgccgctgcaggatccggacgcagctaccgaagaactgcaacgttgcgtcaacgacctgggcttcgtgggtgccctggttaatggctttagccaggaaggcgatggtcaaaccccgctgtattacgacctgccgcagtatcgcccgttctggggtgaagtcgaaaaactggatgtgccgttttatctgcatccgcgtaacccgctgccgcaggattcccgtatctacgacggtcacccgtggctgctgggtccgacctgggcgttcgcccaagaaacggcggtgcatgccctgcgtctgatggcatctggcctgtttgatgaacacccgcgtctgaatattatcctgggtcatctgggcgaaggtctgccgtacatgatgtaccgtatcgatcatcgtatcgcatgggttaaactgccgccgcgttatccggcaaaacgtcgctttatggactacttcaacgaaaattttcacattaccacgtcaggcaacttccgtacccagacgctgattgatgcaatcctggaaattggtgctgatcgcatcctgttctcgaccgactggccgtttgaaaacattgatcatgccgctgcctggtttaatgctacgtctattgccgaagctgaccgtgtcaaaatcggccgcaccaatgcccgtcgtctgttcaaactggatggtgac

SEQ ID NO: 685 - DNA, 984 bp, Artificial Sequence
  synthetic construct; Dicamba decarboxylase variant
atggctcaaggcaaagtggcactggaagaacatttcgcaatcccggaaacgctgcaagactcggcaggcttcgtcccgggcgactactggaaagaactgcagcatcgtctgctggatatccaagacacccgcctgaaactgatggatgcgcacggcatcgagacgatgattctgtccctggctgcaccggctgttcaggcgattccggaccgtcgcaaagccattgaaatcgcacgtcgcgctaatgatttcctggcagaagaatgcgctaaacgtccggaccgctttctggcattcgcagcactgccgctgcaggatccggacgcagctaccgaagaactgcaacgttgcgtcaacaatctgggcttcgtgggtgccctggttaatggctttagccaggaaggcgatggtcaaaccccgctgtattacgacctgccgcagtatcgcccgttctggggtgaagtcgaaaaactggatgtgccgttttatctgcatccgcgtaacccgctgccgcaggattcccgtatctacgacggtcacccgtggctgctgggtccgacctgggcgttcgcccaagaaacggcggtgcatgccctgcgtctgatggcatctggcctgtttgatgaacacccgcgtctgaatattatcctgggtcatctgggcgaaggtctgccgtacatgatgtaccgtatcgatcatcgtatcgcatgggttcacgagccgccgcgttatccggcaaaacgtcgctttatggactacttcaacgaaaattttcacattaccacgtcaggcaacttccgtacccagacgctgattgatgcaatcctggaaattggtgctgatcgcatcctgttctcgaccgactggccgtttgaaaacattgatcatgccgctgactggtttaatgctacgtctattgccgaagctgaccgtgtcaaaatcggccgcaccaatgcccgtcgtctgttcaaactggatggggct

SEQ ID NO: 686 - DNA, 984 bp, Artificial Sequence
  synthetic construct; Dicamba decarboxylase variant
atggctcaaggcaaagtggcactggaagaacatttcgcaatcccggaaacgctgcaagactcggcaggcttcgtcccgggcgactactggaaagaactgcagcatcgtctgctggatatccaagacacccgcctgaaactgatggatgcgcacggcatcggcacgatgattctgtccctggctgcaccggctgttcaggcgattccggaccgtcgcaaagccattgaaatcgcacgtcgcgctaatgatttcctggcagaagaatgcgctaaacgtccggaccgctttctggcattcgcagcactgccgatgcaggatccggacgcagctaccgaagaactgcaacgttgtgtcaacgatctgggcttcgtgggtgccctggttaatggctttagcgtggaaggcgatggtcaaaccccgctgtattacgacctgccgcagtatcgcccgttctggggtgaagtcgaaaaactggatgtgccgttttatctgcatccgcgtaacccgctgccgcaggattcccgtatctacgacggtcacccgtggctgctgggtccgacctgggcgttcgcccaagaaacggcggtgcatgccctgcgtctgatggcatctggcctgtttgatgaacacccgcgtctgaatattatcctgggtcatatgggcgaaggtctgccgtacatgatgtaccgtatcgatcatcgtatcgcatgggttcacgagccgccgcgttatccggcaaaacgtcgctttatggactacttcaacgaaaattttcacattaccacgtcaggcaacttccgtacccagacgctgattgatgcaatcctggaaattggtgctgatcgcatcctgttctcgaccgactggccgtttgaaaacattgatcatgccgctgactggtttaatgctacgtctattgccgaagctgaccgtgtcaaaatcggccgcaccaatgcccgtcgtctgttcaaactggatctggac

SEQ ID NO: 687 - DNA, 984 bp, Artificial Sequence
  synthetic construct; Dicamba decarboxylase variant
atggctcaaggcaaagtggcactggaagaacatttcgcaatcccggaaacgctgcaagactcggcaggcttcgtcccgggcgactactggaaagaactgcagcatcgtctgctggatatccaagacacccgcctgaaactgatggatgcgcacggcatcgaaacgatggttctgtccctggctgcaccggctgttcaggcgattccggaccgtcgcaaagccattgaaatcgcacgtcgcgctaatgatatgctggcagaagaatgcgctaaacgtccggaccgctttctggcattcgcagcactgccgatgcaggatccggacgcagctaccgaagaactgcaacgttgtgtcaacgatctgggcttcgtgggtgccctggttaatggctttagccaggaaggcgatggtcaaaccccgctgtattacgacctgccgcagtatcgcccgttctggggtgaagtcgaaaaactggatgtgccgttttatctgcatccgcgtaacccgctgccgcaggattcccgtatctacgacggtcacccgtggctgctgggtccgacctgggcgttcgcccaagaaacggcggtgcatgccctgcgtctgatggcatctggcctgtttgatgaacacccgcgtctgaatattatcctgggtcatatgggcgaaggtctgccgtacatgatgtaccgtatcgatcatcgtatcgcatgggttcacgagccgccgcgttatccggcaaaacgtcgctttatggactacttcaacgaaaattttcacattaccacgtcaggcaacttccgtacccagacgctgattgatgcaatcctggaaattggtgctgatcgcatcctgttctcgaccgactggccgtttgaaaacattgatcatgccgctgactggtttaatgctacgtctattgccgaagctgaccgtgtcaaaatcggccgcaccaatgcccgtcgtctgttcaaactggatggtgac

SEQ ID NO: 688 - DNA, 984 bp, Artificial Sequence
  synthetic construct; Dicamba decarboxylase variant
atggctcaaggcaaagtggcactggaagaacatttcgcaatcccggagacgctgaacgactcggcaggcttcgtcccgggcgactactggaaagaactgcagcatcgtctgctggatatccaagacacccgcctgaaactgatggatgcgcacggcatcgaaacgatgattctgtccctggctgcaccggctgttcaggcgattccggaccgtcgcaaagccattgaaatcgcacgtcgcgctaatgatttcctggcagaagaatgcgctaaacgtccggaccgctttctggcattcgcagcactgccgctgcaggatccggacgcagctaccgaagaactgcaacgtaccgtcaacactctgggcttcgtgggtgccctggttaatggctttagccaggaaggcgatggtcaaaccccgctgtattacgacctgccgcagtatcgcccgttctggggtgaagtcgaaaaactggatgtgccgttttatctgcatccgcgtaacccgctgccgcaggattcccgtatctacgacggtcacccgtggctgctgggtccgacctgggcgttcgcccaagaaacggcggtgcatgccctgcgtctgatggcatctggcctgtttgatgaacacccgcgtctgaatattatcctgggtcatatgggcgaaggtctgccgtacatgatgtaccgtatcgatcatcgtatcgcatgggttcacgagccgccgcgttatccggcaaaacgtcgctttatggactacttcaacgaaaattttcacattaccacgtcaggcaacttccgtacccagacgctgattgatgcaatcctggaaattggtgctgatcgcatcctgttctcgaccgactggccgtttgaaaacattgatcatgccgctgactggtttaatgctacgtctattgccgaagctgaccgtgtcaaaatcggccgcaccaatgcccgtcgtctgttcaaactggattgtgac

SEQ ID NO: 689 - DNA, 984 bp, Artificial Sequence
  synthetic construct; Dicamba decarboxylase variant
atggctcaaggcaaagtggcactggaagaacatttcgcaatcccggaaacgctgcaagactcggcaggcttcgtcccgggcgactactggaaagaactgcagcatcgtctgctggatatccaagacacccgcctgaaactgatggatgcgcacggcatcgaaacgatgattctgtccctggctgcaccggctgttcaggcgattccggaccgtcgtaaagccattgaaatcgcacgtcgcgctaatgatatgctggcagaagaatgcgctaaacgtccggaccgctttctggcattcgcagcactgccgctgcaggatccggacgcagctaccgaagaactgcaacgtaccgtcaacgatctgggcttcgtgggtgccctggttaatggctttagccaggaaggcgatggtcaaaccccgctgtattacgacctgccgcagtatcgcccgttctggggtgaagtcgaaaaactggatgtgccgttttatctgcatccgcgtaacccgctgccgcaggattcccgtatctacgacggtcacccgtggctgctgggtccgacctgggcgttcgcccaagaaacggcggtgcatgccctgcgtctgatggcatctggcctgtttgatgaacacccgcgtctgaatattatcctgggtcatctgggcgaaggtctgccgtacatgatgtaccgtatcgatcatcgtatcgcatgggttcacgagccgccgcgttatccggcaaaacgtcgctttatggactacttcaacgaaaattttcacattaccacgtcaggcaacttccgtacccagacgctgattgatgcaatcctggaaattggtgctgatcgcatcctgttctcgaccgactggccgtttgaaaacattgatcatgccgctgactggtttaatgctacgtctattgccgaagctgaccgtgtcaaaatcggccgcaccaatgcccgtcgtctgttcaaactggatggtgac

SEQ ID NO: 690 - DNA, 984 bp, Artificial Sequence
  synthetic construct; Dicamba decarboxylase variant
atggctcaaggcaaagtggcactggaagaacatttcgcaatcccggaaacgctgcaagactcggcaggcttcgtcccgggcgactactggaaagaactgcagcatcgtctgctggatatccaagacacccgcctgaaactgatggatgcgcacggcatcgaaacgatgattctgtccctggctgcgccggctgttcaggcgattccggaccgtcgcaaagccattgaaatcgcacgtcgcgctaatgatttcctggcagaagaatgcgctaaacgtccggaccgctttctggcattcgcagcactgccgctgcaggatccggacgcagctaccgaagaactgcaacgtaccgtcaacgacctgggcttcgtgggtgccctggttaatggctttagccaggaaggcgatggtcaaaccccgctgtattacgacctgccgcagtatcgcccgttctggggtgaagtcgaaaaactggatgtgccgttttatctgcatccgcgtaacccgctgccgcaggattcccgtatctacgacggtcacccgtggctgctgggtccgacctgggcgttcgcccaagaaacggcggtgcatgccctgcgtctgatggcatctggcctgtttgatgaacacccgcgtctgaatattatcctgggtcatatgggcgaaggtctgccgtacatgatgtaccgtatcgatcatcgtatcgcatgggttcacgagccgccgcgttatccggcaaaacgtcgctttatggactacttcaacgaaaattttcacattaccacgtcaggcaacttccgtacccagacgctgattgatgcaatcctggaaattggtgctgatcgcatcctgttctcgaccgactggccgtttgaaaacattgatcatgccgctgactggtttaatgctacgtctattgccgaagctgaccgtgtcaaaatcggccgcaccaatgcccgtcgtctgttcaaactggatggcgct

SEQ ID NO: 691 - DNA, 984 bp, Artificial Sequence
  synthetic construct; Dicamba decarboxylase variant
atggctcaaggcaaagtggcactggaagaacatttcgcaatcccggaaacgctgcaagactcggcaggcttcgtcccgggcgactactggaaagaactgcagcatcgtctgctggatatccaagacacccgcctgaaactgatggatgcgcacggcatcgaaacgatggttctgtccctggctgcaccggctgttcaggcgattccggaccgtcgcaaagccattgaaatcgcacgtcgcgctaatgatttcctggcagaagaatgcgctaaacgtccggaccgctttctggcattcgcagcactgccgctgcaggatccggacgcagctaccgaagaactgcaacgttgcgtcaacgacctgggcttcgtgggtgccctggttaatggctttagccaggaaggcgatggtcaaaccccgctgtattacgacctgccgcagtatcgcccgttctggggtgaagtcgaaaaactggatgtgccgttttatctgcatccgcgtaacccgctgccgcaggattcccgtatctacgacggtcacccgtggctgctgggtccgacctgggcgttcgcccaagaaacggcggtgcatgccctgcgtctgatggcatctggcctgtttgatgaacacccgcgtctgaatattatcctgggtcatctgggcgaaggtctgccgtacatgatgtaccgtatcgatcatcgtatcgcatgggttaaactgccgccgcgttatccggcaaaacgtcgctttatggactacttcaacgaaaattttcacattaccacgtcaggcaacttccgtacccagacgctgattgatgcaatcctggaaattggtgctgatcgcatcctgttctcgaccgactggccgtttgaaaacattgatcatgccactgcctggtttaatgctacgtctattgccgaagctgaccgtgtcaaaatcggccgcaccaatgcccgtcgtctgttcaaactggatggcgct

SEQ ID NO: 692 - DNA, 984 bp, Artificial Sequence
  synthetic construct; Dicamba decarboxylase variant
atggctcaaggcaaagtggcactggaagaacatttcgcaatcccggaaacgctgcaggactcggcaggcttcgtcccgggcgactactggaaagaactgcagcatcgtctgctggatatccaagacacccgcctgaaactgatggatgcgcacggcatcgaaacgatgattctgtccctggctgcaccggctgttcaggcgattccggaccgccgcaaagccattgaaatcgcacgtcgcgctaatgatttcctggcagaagaatgcgctaaacgtccggaccgctttctggcattcgcagcactgccgctgcaggatccggacgcagctaccgaagaactgcaacgttgtgtcaacgatctgggcttcgtgggtgccctggttaatggctttagcgtggaaggcgatggtcaaaccctgctgtattacgacctgccgcagtatcgcccgttctggggtgaagtcgaaaaactggatgtgccgttttatctgcatccgcgtaacccgctgccgcaggattcccgtatctacgacggtcacccgtggctgctgggtccgacctgggcgttcgcccaagaaacggcggtgcatgccctgcgtctgatggcatctggcctgtttgatgaacacccgcgtctgaatattatcctgggtcatctgggcgaaggtctgccgtacatgatgtaccgtatcgatcatcgtatcgcatgggttcacccaccgccgcgttatccggcaaaacgtcgctttatggactacttcaacgaaaattttcacattaccacgtcaggcaacttccgtacccagacgctgattgatgcaatcctggaaattggtgctgatcgcatcctgttctcgaccgactggccgtttgaaaacattgatcatgccgctgactggtttaatgctacgtctattgccgaagctgaccgtctgaaaatcggccgcaccaatgcccgtcgtctgttcaaactggatggcgct

SEQ ID NO: 693 - DNA, 984 bp, Artificial Sequence
  synthetic construct; Dicamba decarboxylase variant
atggctcaaggcaaagtggcactggaagaacatttcgcaatcccggaaacgctgcaagactcggcaggcttcgtcccgggcgactactggaaagaactgcagcatcgtctgctggatatccaagacacccgcctgaaactgatggatgcgcaccaaatcggcacgatgattctgtccctggctgcaccggctgttcaggcgattccggaccgtcgcaaagccattgaaatcgcacgtcgcgctaatgatttcctggcagaagaatgcgctaaacgtccggaccgctttctggcattcgcagcactgccgctgcaggatccggacgcagctaccgaagaactgcaacgttgtgtcaacgatctgggcttcgtgggtgccctggttaatggctttagccaggaaggcgatggtcaaaccccgctgtattacgacctgccgcagtatcgcccgttctggggtgaagtcgaaaaactggatgtgccgttttatctgcatccgcgtaacccgctgccgcaggattcccgtatctacgacggtcacccgtggctgctgggtccgacctgggcgttcgcccaagaaacggcggtgcatgccctgcgtctgatggcatctggcctgtttgatgaacacccgcgtctgaatattatcctgggtcatatgggcgaaggtctgccgtacatgatgtaccgtatcgatcatcgtatcgcatgggttcacgagccgccgcgttatccggcaaaacgtcgctttattgactacttcaacgaaaattttcacattaccacgtcaggcaacttccgtacccagacgctgattgatgcaatcctggaaattggtgctgatcgcatcctgttctcgaccgactggccgtttgaaaacattgatcatgccgctgactggtttaatgctacgtctattgccgaagctgaccgtgtcaaaatcggccgcaccaatgcccgtcgtctgttcaaactggatctggac

SEQ ID NO: 694 - DNA, 984 bp, Artificial Sequence
  synthetic construct; Dicamba decarboxylase variant
atggctcaaggcaaagtggcactggaagaacatttcgcaatcccggaaacgctgcaagactcggcaggcttcgtcccgggcgactactggaaagaactgcagcatcgtctgctggatatccaagacacccgcctgaaactgatggatgcgcacggcatcgaaacgatgattctgtccctggctgcaccggctgttcaggcgattccggaccgtcgcaaagccattgaaatcgcacgtcgcgctaatgatttcctggcagaagaatgcgctaaacgtccggaccgctttctggcattcgcagcactgccgctgcaggatgtggacgcagctagcgaagaactgcaacgttgtgtcaacgatctgggcttcgtgggtgccctggttaatggctttagccaggaaggcgatggtcaaaccccgctgtattacgacctgccgcagtatcgcccgttctggggtgaagtcgaaaaactggatgtgccgttttatctgcatccgcgtaacccgctgccgcaggattcccgtatctacgacggtcacccgtggctgctgggtccgacctgggcgttcgcccaagaaacggcggtgcatgccctgcgtctgatggcatctggcctgtttgatgaacacccgcgtctgaatattatcctgggtcatatgggcgaaggtctgccgtacatgatgtaccgtatcgatcatcgtatcgcatgggttcacgagccgccgcgttatccggcaaaacgtcgctttatggactacttcaacgaaaattttcacattaccacgtcaggcaacttccgtacccagacgctgattgatgcaatcctggaaattggtgctgatcgcatcctgttctcgaccgactggccgtttgaaaacattgatcatgccgctgactggtttaatgctacgtctattgccgaagctgaccgtgtcaaaatcggccgcaccaatgcccgtcgtctgttcaaactggatggcgct

SEQ ID NO: 695 - DNA, 984 bp, Artificial Sequence
  synthetic construct; Dicamba decarboxylase variant
atggctcaaggcaaagtggcactggaagaacatttcgcaatcccggaaacgctgcaagactcggcaggcttcgtcccgggcgactactggaaagaactgcagcatcgtctgctggatatccaagacacccgcctgcgcctgatggatgcgcacggcatcgaaacgatgattctgtccctggctgcaccggctgttcaggcgattccggaccgtcgcaaagccattgaaatcgcacgtcgcgctaatgatttcctggcagaagaatgcgctaaacgtccggaccgctttctggcattcgcagcactgccgctgcaggatgtggacgcagctagcgaagaactgcaacgttgcgtcaacactctgggcttcgtgggtgccctggttaatggctttagccaggaaggcgatggtcaaaccccgctgtattacgacctgccgcagtatcgcccgttctggggtgaagtcgaaaaactggatgtgccgttttatctgcatccgcgtaacccgctgccgcaggattcccgtatctacgacggtcacccgtggctgctgggtccgacctgggcgttcgcccaagaaacggcggtgcatgccctgcgtctgatggcatctggcctgtttgatgaacacccgcgtctgaatattatcctgggtcatatgggcgaaggtctgccgtacatgatgtaccgtatcgatcatcgtatcgcatgggttcacgagccgccgcgttatccggcaaaacgtcgctttatggactacttcaacgaaaattttcacattaccacgtcaggcaacttccgtacccagacgctgattgatgcaatcctggaaattggtgctgatcgcatcctgttctcgaccgactggccgtttgaaaacattgatcatgccgctgactggtttaatgctacgtctattgccgaagctgaccgtgtcaaaatcggccgcaccaatgcccgtcgtctgttcaaactggatggtgac

SEQ ID NO: 696 - DNA, 984 bp, Artificial Sequence
  synthetic construct; Dicamba decarboxylase variant
atggctcaaggcaaagtggcactggaagaacatttcgcaatcccggaaacgctgcaagactcggcaggcttcgtcccgggcgactactggaaagaactgcagcatcgtctgctggatatccaagacacccgcctgaaactgatggatgcgcacggcatcgaaacgatgattctgtccctggctgcaccggctgttcaggcgattccggaccgtcgcaaagccattgaaatcgcacgtcgcgctaatgatttcctggcagaagaatgcgctaaacgtccggaccgctttctggcattcgcagcactgccgctgcaggatccggacgcagctaccgaagaactgcaacgttgtgtcaacgatctgggcttcgtgggtgccctggttaatggctttagcgtggaaggcgatggtcaaaccccgctgtattacgacctgccgcagtatcgcccgttctggggtgaagtcgaaaaactggatgtgccgttttatctgcatccgcgtaacccgctgccgcaggattcccgtatctacgacggtcacccgtggctgctgggtccgacctgggcgttcgcccaagaaacggcggtgcatgccctgcgtctgatggcatctggcctgtttgatgaacacccgcgtctgaatattatcctgggtcatatgggcgaaggtctgccgtacatgatgtaccgtatcgatcatcgtatcgcatgggttaaactgccgccgcgttatccggcaaaacgtcgctttatggactacttcaacgaaaattttcacattaccacgtcaggcaacttccgtacccagacgctgattgatgcaatcctggaaattggtgctgatcgcatcctgttctcgaccgactggccgtttgaaaacattgatcatgccgctgactggtttaatgctacgtctattgccgaagctgaccgtctgaaaatcggccgcaccaatgcccgtcgtctgttcaaactggatggcgct

SEQ ID NO: 697 - DNA, 984 bp, Artificial Sequence
  synthetic construct; Dicamba decarboxylase variant
atggctcaaggcaaagtggcactggaagaacatttcgcaatcccggaaacgctgcaagactcggcaggcttcgtcccgggcgactactggaaagaactgcagcatcgtctgctggatatccaagacacccgcctgaaactgatggatgcgcacggcatcgaaacgatgattctgtccctggctgcaccggctgttcaggcgattccggaccgtcgcaaagccattgaaatcgcacgtcgcgctaatgatttcctggcagaagaatgcgctaaacgtccggaccgctttctggcattcgcagcactgccgatgcaggatgtggacgcagctaccgaagaactgcaacgttgtgtcaacgatctgggcttcgtgggtgccctggttaatggctttagcgtggaaggcgatggtcaaaccccgctgtattacgacctgccgcagtatcgcccgttctggggtgaagtcgaaaaactggatgtgccgttttatctgcatccgcgtaacccgctgccgcaggattcccgtatctacgacggtcacccgtggctgctgggtccgacctgggcgttcgcccaagaaacggcggtgcatgccctgcgtctgatggcatctggcctgtttgatgaacacccgcgtctgaatattatcctgggtcatatgggcgaaggtctgccgtacatgatgtaccgtatcgatcatcgtatcgcatgggttcacgagccgccgcgttatccggcaaaacgtcgctttatggactacttcaacgaaaattttcacattaccacgtcaggcaacttccgtacccagacgctgattgatgcaatcctggaaattggtgctgatcgcatcctgttctcgaccgactggccgtttgaaaacattgatcatgccactgactggtttaatgctacgtctattgccgaagctgaccgtgtcaaaatcggccgcaccaatgcccttcgtctgttcaaactggatggcgct

SEQ ID NO: 698 - DNA, 984 bp, Artificial Sequence
  synthetic construct; Dicamba decarboxylase variant
atggctcaaggcaaagtggcactggaagaacatttcgcaatcccggaaacgctgcaagactcggcaggcttcgtcccgggcgactactggaaagaactgcagcatcgtctgctggatatccaagacacccgcctgaaactgatggatgcgcacggcatcgaaacgatgattctgtccctggctgcaccggctgttcaggcgattccggaccgtcgcaaagccattgaaatcgcacgtcgcgctaatgatttcctggcagaagaatgcgctaaacgtccggaccgctttctggcattcgcagcactgccgatgcaggatccggacgcagctaccgaagaactgcaacgttgcgtcaacaatctgggcttcgtgggtgccctggttaatggctttagccaggaaggcgatggtcaaaccccgctgtattacgacctgccgcagtatcgcccgttctggggtgaagtcgaaaaactggatgtgccgttttatctgcatccgcgtaacccgctgccgcaggattcccgtatctacgacggtcacccgtggctgctgggtccgacttgggcgttcgcccaagaaacggcggtgcatgccctgcgtctgatggcatctggcctgtttgatgaacacccgcgtctgaatattatcctgggtcatatgggcgaaggtctgccgtacatgatgtaccgtatcgatcatcgtatcgcatgggttaaactgccgccgcgttatccggcaaaacgtcgctttatggactacttcaacgaaaattttcacattaccacgtcaggcaacttccgtacccagacgctgattgatgcaatcctggaaattggtgctgatcgcatcctgttctcgaccgactggccgtttgaaaacattgatcatgccgctgactggtttaatgctacgtctattgccgaagctgaccgtgtcaaaatcggccgcaccaatgcccgtcgtctgttcaaactggatggggat

SEQ ID NO: 699 - DNA, 984 bp, Artificial Sequence
  synthetic construct; Dicamba decarboxylase variant
atggctcaaggcaaagtggcactggaagaacatttcgcaatcccggaaacgctgcaagactcggcaggcttcgtcccgggcgactactggaaagaactgcagcatcgtctgctggatatccaagacacccgcctgaaactgatggatgcgcacggcatcgaaacgatgattctgtccctggctgcaccggctgttcaggcgattccggaccgtcgcaaagccattgaaatcgcacgtcgcgctaatgatatgctggcagaagaatgcgctaaacgtccggaccgctttctggcattcgcagcactgccgctgcaggatccggacgcagctaccgaagaactgcaacgtaccgtcaacgatctgggcttcgtgggtgccctggttaatggctttagccaggaaggcgatggtcaaaccccgctgtattacgacctgccgcagtatcgcccgttctggggtgaagtcgaaaaactggatgtgccgttttatctgcatccgcgtaacccgctgccgcaggattcccgtatctacgacggtcacccgtggctgctgggtccgacctgggcgttcgcccaagaaacggcggtgcatgccctgcgtctgatggcatctggcctgtttgatgaacacccgcgtctgaatattatcctgggtcatctgggcgaaggtctgccgtacatgatgtaccgtatcgatcatcgtatcgcatgggttcacccaccgccgcgttatccggcaaaacgtcgctttatggactacttcaacgaaaattttcacattaccacgtcaggcaacttccgtacccagacgctgattgatgcaatcctggaaattggtgctgatcgcatcctgttctcgaccgactggccgtttgaaaacattgatcatgccgctgactggtttaatgctacgtctattgccgaagctgaccgtgtcaaaatcggccgcaccaatgcccgtcgtctgttcaaactggatggcgct

SEQ ID NO: 700 - DNA, 984 bp, Artificial Sequence
  synthetic construct; Dicamba decarboxylase variant
atggctcaaggcaaagtggcactggaagaacatttcgcaatcccggaaacgctgcaagactcggcaggcttcgtcccgggcgactactggaaagaactgcagcatcgtctgctggatatccaagacacccgcctgaaactgatggatgcgcacggcatcgaaacgatgattctgtccctggctgcaccggctgttcaggcgattccggaccgtcgcaaagccattgaaatcgcacgtcgcgctaatgatatgctggcagaagaatgcgctaaacgtccggaccgctttctggcattcgcagcactgccgctgcaggatccggacgcagctaccgaagaactgcaacgttgtgtcaacgatctgggcttcgtgggtgccctggttaatggctttagccaggaaggcgatggtcaaaccccgctgtattacgacctgccgcagtatcgcccgttctggggtgaagtcgaaaaactggatgtgccgttttatctgcatccgcgtaacccgctgccgcaggattcccgtatctacgacggtcacccgtggctgctgggtccgacctgggcgttcgcccaagaaacggcggtgcatgccctgcgtctgatggcatctggcctgtttgacgagcacccgcgtctgaatattatcctgggtcatatgggcgaaggtctgccgtacatgatgtaccgtatcgatcatcgtatcgcatgggttcacgagccgccgcgttatccggcaaaacgtcgctttatggactacttcaacgaaaattttcacattaccacgtcaggcaacttccgtacccagacgctgattgatgcaatcctggaaattggtgctgatcgcatcctgttctcgaccgactggccgtttgaaaacattgatcatgccgctgactggtttaatgctacgtctattgccgaagctgaccgtgtcaaaatcggccgcaccaatgcccgtcgtctgttcaaactggatggcgct

SEQ ID NO: 701 - DNA, 984 bp, Artificial Sequence
  synthetic construct; Dicamba decarboxylase variant
atggctcaaggcaaagtggcactggaagaacatttcgcaatcccggaaacgctgcaagactcggcaggcttcgtcccgggcgactactggaaagaactgcagcatcgtctgctggatatccaagacacccgcctgcgcctgatggatgcgcacggcatcgaaacgatgattctgtccctggctgcaccggctgttcaggcgattccggaccgtcgtaaagccattgaaatcgcacgtcgcgctaatgatttcctggcagaagaatgcgctaaacgtccggaccgctttctggcattcgcagcactgccgctgcaggatgtggacgcagctaccgaagaactgcaacgttgtgtcaacgatctgggcttcgtgggtgccctggttaatggctttagcgtggaaggcgatggtcaaaccccgctgtattacgacctgccgcagtatcgcccgttctggggtgaagtcgaaaaactggatgtgccgttttatctgcatccgcgtaacccgctgccgcaggattcccgtatctacgacggtcacccgtggctgctgggtccgacctgggcgttcgcccaagaaacggcggtgcatgccctgcgtctgatggcatctggcctgtttgatgaacacccgcgtctgaatattatcctgggtcatatgggcgaaggtctgccgtacatgatgtaccgtatcgatcatcgtatcgcatgggttaaactgccgccgcgttatccggcaaaacgtcgctttatggactacttcaacgaaaattttcacattaccacgtcaggcaacttccgtacccagacgctgattgatgcaatcctggaaattggtgctgatcgcatcctgttctcgaccgactggccgtttgaaaacattgatcatgccgctgactggtttaatgctacgtctattgccgaagctgaccgtgtcaaaatcggccgcaccaatgcccgtcgtctgttcaaactggatggcgct

SEQ ID NO: 702 - DNA, 984 bp, Artificial Sequence
  synthetic construct; Dicamba decarboxylase variant
atggctcaaggcaaagtggcactggaagaacatttcgcaatcccggaaacgctgcaagactcggcaggcttcgtcccgtctgaatacctgaaagaactgcagcatcgtctgctggatatccaagacacccgcctgaaactgatggatgcgcacggcatcgaaacgatgattctgtccctggctgcaccggctgttcaggcgattccggaccgtcgtaaagccattgaaatcgcacgtcgcgctaatgatttcctggcagaagaatgcgctaaacgtccggaccgctttctggcattcgcagcactgccgctgcaggatccggacgcggctaccgaagaactgcaacgtaccgtcaacactctgggcttcgtgggtgccctggttaatggctttagcgtggaaggcgatggtcaaaccccgctgtattacgacctgccgcagtatcgcccgttctggggtgaagtcgaaaaactggatgtgccgttttatctgcatccgcgtaacccgctgccgcaggattcccgtatctacgacggtcacccgtggctgctgggtccgacctgggcgttcgcccaagaaacggcggtgcatgccctgcgtctgatggcatctggcctgtttgatgaacacccgcgtctgaatattatcctgggtcatatgggcgaaggtctgccgtacatgatgtaccgtatcgatcatcgtatcgcatgggttcacgagccgccgcgttatccggcaaaacgtcgctttatggactacttcaacgaaaattttcacattaccacgtcaggcaacttccgtacccagacgctgattgatgcaatcctggaaattggtgctgatcgcatcctgttctcgaccgactggccgtttgaaaacattgatcatgccgctgactggtttaatgctacgtctattgccgaagctgaccgtgtcaaaatcggccgcaccaatgcccgtcgtctgttcaaactggatctggac

SEQ ID NO: 703 - DNA, 984 bp, Artificial Sequence
  synthetic construct; Dicamba decarboxylase variant
atggctcaaggcaaagtggcactggaagaacatttcgcaatcccggaaacgctgcaagactcggcaggcttcgtcccgggcgactactggaaagaactgcagcatcgtctgctggatatccaagacacccgcctgaaactgatggatgcgcaccgcatcgaaacgatgattctgtccctggctgcaccggctgttcaggcgattccggaccgtcgcaaagccattgaaatcgcacgtcgcgctaatgatatcctggcagaagaatgcgctaaacgtccggaccgctttctggcattcgcagcactgccgatgcaggatgtggacgcagctaccgaagaactgcaacgttgcgtcaacgatctgggcttcgtgggtgccctggttaatggctttagccaggaaggcgatggtcaaaccccgctgtattacgacctgccgcagtatcgcccgttctggggtgaagtcgaaaaactggatgtgccgttttatctgcatccgcgtaacccgctgccgcaggattcccgtatctacgacggtcacccgtggctgctgggtccgacctgggcgttcgcccaagaaacggcggtgcatgccctgcgtctgatggcatctggcctgtttgatgaacacccgcgtctgaatattatcctgggtcatatgggcgaaggtctgccgtacatgatgtaccgtatcgatcatcgtatcgcatgggttcaccagccgccgcgttatccggcaaaacgtcgctttatggactacttcaacgaaaattttcacattaccacgtcaggcaacttccgtacccagacgctgattgatgcaatcctggaaattggtgctgatcgcatcctgttctcgaccgactggccgtttgaaaacattgatcatgccgctgactggtttaatgctacgtctattgccgaagctgaccgtgtcaaaatcggccgcaccaatgcccgtcgtctgttcaaactggatggtgac

SEQ ID NO: 704 - DNA, 984 bp, Artificial Sequence
  synthetic construct; Dicamba decarboxylase variant
atggctcaaggcaaagtggcactggaagaacatttcgcaatcccggaaacgctgcaagactcggcaggcttcgtcccgggcgactactggaaagaactgcagcatcgtctgctggatatccaagacacccgcctgaaactgatggatgcgcacggcatcgaaacgatgattctgtccctggctgcaccggctgttcaggcgattccggaccgtcgcaaagccattgaaatcgcacgtcgcgctaatgatatgctggcagaagaatgcgctaaacgtccggaccgctttctggcattcgcagcactgccgctgcaggatccggacgcagctaccgaagaactgcaacgttgtgtcaacgatctgggcttcgtgggtgccctggttaatggctttagccaggaaggcgatggtcaaaccccgctgtattacgacctgccgcagtatcgcccgttctggggtgaagtcgaaaaactggatgtgccgttttatctgcatccgcgtaacccgctgccgcaggattcccgtatctacgacggtcacccgtggctgctgggtccgacctgggcgttcgcccaagaaacggcggtgcatgccctgcgtctgatggcatctggcctgtttgatgaacacccgcgtctgaatattatcctgggtcatatgggcgaaggtctgccgtacatgatgtaccgtatcgatcatcgtatcgcatgggttcacgagccgccgcgttatccggcaaaacgtcgctttatggactacttcaacgaaaattttcacattaccacgtcaggcaacttccgtacccagacgctgattgatgcaatcctggaaattggtgctgatcgcatcctgttctcgaccgactggccgtttgaaaacattgatcatgccgctgactggtttaatgctacgtctattgccgaagctgaccgtgtcaaaatcggccgcaccaatgcccgtcgtctgttcaaactggatggtgac

SEQ ID NO: 705 - DNA, 984 bp, Artificial Sequence
  synthetic construct; Dicamba decarboxylase variant
atggctcaaggcaaagtggcactggaagaacatttcgcaatcccggaaacgctgcaagactcggcaggcttcgtcccgggcgactactggaaagaactgcagcatcgtctgctggatatccaagacacccgcctgaaactgatggatgcgcacggcatcgacacgatgattctgtccctggctgcaccgggtgttcaggcgattccggaccgtcgcaaagccattgaaatcgcacgtcgcgctaatgatatcctggcagaagaatgcgctaaacgtccggaccgctttctggcattcgcagcactgccgctgcaggatccggacgcagctaccgaagaactgcaacgttgcgtcaacgatctgggcttcgtgggtgccctggttaatggctttagccaggaaggcgatggtcaaaccccgctgtattacgacctgccgcagtatcgcccgttctggggtgaagtcgaaaaactggatgtgccgttttatctgcatccgcgtaacccgctgccgcaggattcccgtatctacgacggtcacccgtggctgctgggtccgacctgggcgttcgcccaagaaacggcggtgcatgccctgcgtctgatggcatctggcctgtttgatgaacacccgcgtctgaatattatcctgggtcatatgggcgaaggtctgccgtacatgatgtaccgtatcgatcatcgcatcgcatgggttcaagagccgccgcgttatccggcaaaacgtcgctttatggactacttcaacgaaaattttcacattaccacgtcaggcaacttccgtacccagacgctgattgatgcaatcctggaaattggtgctgatcgcatcctgttctcgaccgactggccgtttgaaaacattgatcatgccgctgactggtttaatgctacgtctattgccgaagctgaccgtgtcaaaatcggccgcaccaatgcccgtcgtctgttcaaactggatctggac

SEQ ID NO: 706 - DNA, 984 bp, Artificial Sequence
  synthetic construct; Dicamba decarboxylase variant
atggctcaaggcaaagtggcactggaagaacatttcgcaatcccggaaacgctgcaagactcggcaggcttcgtcccgggcgactactggaaagaactgcagcatcgtctgctggatatccaagacacccgcctgcgcctgatggatgcgcacggcatcggcacgatgattctgtccctggctgcaccgggtgttcaggcgattccggaccgtcgcaaagccattgaaatcgcacgtcgcgctaatgatttcctggcagaagaatgcgctaaacgtccggaccgctttctggcattcgcagcactgccgctgcaggatgtggacgcagctagcgaagaactgcaacgttgtgtcaacgatctgggcttcgtgggtgccctggttaatggctttagccaggaaggcgatggtcaaaccccgctgtattacgacctgccgcagtatcgcccgttctggggtgaagtcgaaaaactggatgtgccgttttatctgcatccgcgtaacccgctgccgcaggattcccgtatctacgacggtcacccgtggctgctgggtccgacctgggcgttcgcccaagaaacggcggtgcatgccctgcgtctgatggcatctggcctgtttgatgaacacccgcgtctgaatattatcctgggtcatatgggcgaaggtctgccgtacatgatgtaccgtatcgatcatcgtatcgcatgggttaaactgccgccgcgttatccggcaaaacgtcgctttatggactacttcaacgaaaattttcacattaccacgtcaggcaacttccgtacccagacgctgattgatgcaatcctggaaattggtgctgatcgcatcctgttctcgaccgactggccgtttgaaaacattgatcatgccgctgactggtttaatgctacgtctattgccgaagctgaccgtgtcaaaatcggccgcaccaatgcccgtcgtctgttcaaactggatggcgct

SEQ ID NO: 707 - DNA, 984 bp, Artificial Sequence
  synthetic construct; Dicamba decarboxylase variant
atggctcaaggcaaagtggcactggaagaacatttcgcaatcccggaaacgctgcaagactcggcaggcttcgtcccgggcgactactggaaagaactgcagcatcgtctgctggatatccaagacacccgcctgaaactgatggatgcgcacggcatcgaaacgatgattctgtccctggctgcaccggctgttcaggcgattccggaccgtgtaaaagccattgaaatcgcacgtcgcgctaatgatttcctggcagaagaatgcgctaaacgtccggaccgctttctggcattcgcagcactgccgctgcaggatccagacgcagctaccgaagaactgcaacgttgtgtcaacgatctgggcttcgtgggtgccctggttaatggctttagccaggaaggcgatggtcaaaccccgctgtattacgacctgccgcagtatcgcccgttctggggtgaagtcgaaaaactggatgtgccgttttatctgcatccgcgtaacccgctgccgcaggattcccgtatctacgacggtcacccgtggctgctgggtccgacctgggcgttcgcccaagaaacggcggtgcatgccctgcgtctgatggcatctggcctgtttgatgaacacccgcgtctgaatattatcctgggtcatatgggcgaaggtctgccgtacatgatgtaccgtatcgatcatcgtatcgcatgggttaaactgccgccgcgttatccggcaaaacgtcgctttatggactacttcaacgaaaattttcacattaccacgtcaggcaacttccgtacccagacgctgattgatgcaatcctggaaattggtgctgatcgcatcctgttctcgaccgactggccgtttgaaaacattgatcatgccgctgactggtttaatgctacgtctattgccgaagctgaccgtgtcaaaatcggccgcaccaatgcccgtcgtctgttcaaactggatggtgac

SEQ ID NO: 708 - DNA, 984 bp, Artificial Sequence
  synthetic construct; Dicamba decarboxylase variant
atggctcaaggcaaagtggcactggaagaacatttcgcaatcccggaaacgctgcaagactcggcaggcttcgtcccgggcgactactggaaagaactgcagcatcgtctgctggatatccaagacacccgcctgaaactgatggatgcgcacggcatcgaaacgatgattctgtccctggctgcaccggctgttcaggcgattccggaccgtcgtcaagccattgaaatcgcacgtcgcgctaatgatttcctggcagaagaatgcgctaaacgtccggaccgctttctggcattcgcagcactgccgctgcaggatccggacgcagctagcgaagaactgcaacgttgtgtcaacgatctgggcttcgtgggtgccctggttaatggctttagcgtggaaggcgatggtcaaaccccgctgtattacgacctgccgcagtatcgcccgttctggggtgaagtcgaaaaactggatgtgccgttttatctgcatccgcgtaacccgctgccgcaggattcccgtatctacgacggtcacccgtggctgctgggtccgacctgggcgttcgcccaagaaacggcggtgcatgccctgcgtctgatggcatctggcctgtttgatgaacacccgcgtctgaatattatcctgggtcatctgggcgaaggtctgccgtacatgatgtaccgtatcgatcatcgtatcgcatgggttcacccaccgccgcgttatccggcaaaacgtcgctttatggactacttcaacgaaaattttcacattaccacgtcaggcaacttccgtacccagacgctgattgatgcaatcctggaaattggtgctgatcgcatcctgttctcgaccgactggccgtttgaaaacattgatcatgccgctgactggtttaatgctacgtctattgccgaagctgaccgtgtcaaaatcggccgcaccaatgcccgtcgtctgttcaaactggatggcgct

SEQ ID NO: 709 - DNA, 984 bp, Artificial Sequence
  synthetic construct; Dicamba decarboxylase variant
atggctcaaggcaaagtggcactggaagaacatttcgcaatcccggaaacgctgcaagactcggcaggcttcgtcccgggcgactactggaaagaactgcagcatcgtctgctggatatccaagacacccgcctgcgcctgatggatgcgcacggcatcgaaacgatgattctgtccctggctgcagttggtgttcaggcgattccggaccgtcgcaaagccattgaaatcgcacgtcgcgctaatgatttcctggcagaagaatgcgctaaacgtccggaccgctttctggcattcgcagcactgccgctgcaggatccggacgcagctaccgaagaactgcaacgttgtgtcaacgatctgggcttcgtgggtgccctggttaatggctttagccaggaaggcgatggtcaaaccccgctgtattacgacctgccgcagtatcgcccgttctggggtgaagtcgaaaaactggatgtgccgttttatctgcatccgcgtaacccgctgccgcaggattcccgtatctacgacggtcacccgtggctgctgggtccgacctgggcgttcgcccaagaaacggcggtgcatgccctgcgtctgatggcatctggcctgtttgatgaacacccgcgtctgaatattatcctgggtcatatgggcgaaggtctgccgtacatgatgtaccgtatcgatcatcgtatcgcatgggttcacccaccgccgcgttatccggcaaaacgtcgctctatggactacttcaacgaaaattttcacattaccacgtcaggcaacttccgtacccagacgctgattgatgcaatcctggaaattggtgctgatcgcatcctgttctcgaccgactggccgtttgaaaacattgatcatgccgctgactggtttaatgctacgtctattgccgaagctgaccgtgtcaaaatcggccgcaccaatgcccgtcgtctgttcaaactggatggtgac

SEQ ID NO: 710 - DNA, 984 bp, Artificial Sequence
  synthetic construct; Dicamba decarboxylase variant
atggctcaaggcaaagtggcactggaagaacatttcgcaatcccggaaacgctgcaagactcggcaggcttcgtcccgggcgactactggaaagaactgcagcatcgtctgctggatatccaagacacccgcctgaacctgatggatgcgcacggcatcgaaacgatgattctgtccctggctgcaccggctgttcaggcgattccggaccgtcgcaaagccattgaaatcgcacgtcgcgctaatgatttcctggcagaagaatgcgctaaacgtccggaccgctttctggcattcgcagcactgccgctgcaggatccggacgcagctaccgaagaactgcaacgttgtgtcaacgatctgggcttcgtgggtgccctggttaatggctttagccaggaaggcgatggtcaaaccccgctgtattacgacctgccgcagtatcgcccgttctggggtgaagtcgaaaaactggatgtgccgttttatctgcatccgcgtaacccgctgccgcaggattcccgtatctacgacggtcacccgtggctgctgggtccgacctgggcgttcgcccaagaaacggcggtgcatgccctgcgtctgatggcatctggcctgtttgatgaacacccgcgtctgaatattatcctgggtcatatgggcgaaggtctgccgtacatgatgtaccgtatcgatcatcgtatcgcatgggttcacgagccgccgcgttatccggcaaaacgtcgctttatggactacttcaacgaaaattttcacattaccacgtcaggcaacttccgtacccagacgctgattgatgcaatcctggaaattggtgctgatcgcatcctgttctcgaccgactggccgtttgaaaacattgatcatgccgctgactggtttaatgctacgtctattgccgaagctgaccgtgtcaaaatcggccgcaccaatgcccgtcgtctgttcaaactggatgtggat

SEQ ID NO: 711 - DNA, 984 bp, Artificial Sequence
  synthetic construct; Dicamba decarboxylase variant
atggctcaaggcaaagtggcactggaagaacatttcgcaatcccggaaacgctgcaagactcggcaggcttcgtcccgggcgactactggaaagaactgcagcatcgtctgctggatatccaagacacccgcctgaaactgatggatgcgcacggcatcgaaacgatgattctgtccctggctgcaccggctgttcaggcgattccggaccgtcgtaaagccattgaaatcgcacgtcgcgctaatgatttcctggcagaagaatgcgctaaacgtccggaccgctttctggcattcgcagcactgccgctgcaggatgtggacgcagctaccgaagaactgcaacgttgcgtcaacgatctgggcttcgtgggtgccctggttaatggctttagcgtggaaggcgatggtcaaaccccgctgtattacgacctgccgcagtatcgcccgttctggggtgaagtcgaaaaactggatgtgccgttttatctgcatccgcgtaacccgctgccgcaggattcccgtatctacgacggtcacccgtggctgctgggtccgacctgggcgttcgcccaagaaacggcggtgcatgccctgcgtctgatggcatctggcctgtttgatgaacacccgcgtctgaatattatcctgggtcatatgggcgaaggtctgccgtacatgatgtaccgtatcgatcatcgtatcgcatgggttcacgagccgccgcgttatccggcaaaacgtcgctttatggactacttcctggaaaattttcacattaccacgtcaggcaacttccgtacccagacgctgattgatgcaatcctggaaattggtgctgatcgcatcctgttctcgaccgactggccgtttgaaaacattgatcatgccgctgactggtttaatgctacgtctattgccgaagctgaccgtgtcaaaatcggccgcaccaatgcccgtcgtctgttcaaactggatctggac

SEQ ID NO: 712 - DNA, 984 bp, Artificial Sequence
  synthetic construct; Dicamba decarboxylase variant
atggctcaaggcaaagtggcactggaagaacatttcgcaatcccggaaacgctgcaagactcggcaggcttcgtcccgggcgactactggaaagaactgcagcatcgtctgctggatatccaagacacccgcctgcgcctgatggatgcgcacggcatcgaaacgatgattctgtccctggctgcaccggctgttcaggcgattccggaccgtcgcaaagccattgaaatcgcacgtcgcgctaatgatttcctggcagaagaatgcgctaaacgtccggaccgctttctggcattcgcagcactgccgctgcaggatccggacgcagctaccgaagaactgcaacgtaccgtcaacgacctgggcttcgtgggtgccctggttaatggctttagccaggaaggcgatggtcaaacaccgctgtattacgacctgccgcagtatcgcccgttctggggtgaagtcgaaaaactggatgtgccgttttatctgcacccgcgtaacccgctgccgcaggattcccgtatctacgacggtcacccgtggctgctgggtccgacctgggcgttcgcccaagaaacggcggtgcatgccctgcgtctgatggcatctggcctgtttgatgaacacccgcgtctgaatattatcctgggtcatatgggcgaaggtctgccgtacatgatgtaccgtatcgatcatcgtatcgcatgggttcacgagccgccgcgttatccggcaaaacgtcgctttatggactacttcaacgaaaattttcacattaccacgtcaggcaacttccgtacccagacgctgattgatgcaatcctggaaattggtgctgatcgcatcctgttctcgaccgactggccgtttgaaaacattgatcatgccgctgactggtttaatgctacgtctattgccgaagctgaccgtgtcaaaatcggccgcaccaatgcccgtcgtctgttcaaactggatggcgct

SEQ ID NO: 713 - DNA, 984 bp, Artificial Sequence
  synthetic construct; Dicamba decarboxylase variant
atggctcaaggcaaagtggcactggaagaacatttcgcaatcccggaaacgctgcaagactcggcaggcttcgtcccgtctgaatacctgaaagaactgcagcatcgtctgctggatatccaagacacccgcctgaaactgatggatgcgcacggcatcgaaacgatgattctgtccctggctgcaccggctgttcaggcgattccggaccgtcgcaaagccattgaaatcgcacgtcgcgctaatgatttcctggcagaagaatgcgctaaacgtccggaccgctttctggcattcgcagcactgccgatgcaggatccggacgcagctaccgaagaactgcaacgttgtgtcaacgatctgggcttcgtgggtgccctggttaatggctttagcgtggaaggcgatggtcaaaccccgctgtattacgacctgccgcagtatcgcccgttctggggtgaagtcgaaaaactggatgtgccgttttatctgcatccgcgtaacccgctgccgcaggattcccgtatctacgacggtcacccgtggctgctgggtccgacctgggcgttcgcccaagaaacggcggtgcatgccctgcgtctgatggcatctggcctgtttgatgaacacccgcgtctgaatattatcctgggtcatatgggcgaaggtctgccgtacatgatgtaccgtatcgatcatcgtatcgcatgggttcacgagccgccgcgttatccggcaaaacgtcgctttatggactacttcaacgaaaattttcacattaccacgtcaggcaacttccgtacccagacgctgattgatgcaatcctggaaattggtgctgatcgcatcctgttctcgaccgactggccgtttgaaaacattgatcatgccactgcctggtttaatgctacgtctattgccgaagctgaccgtgtcaaaatcggccgcaccaatgcccgtcgtctgttcaaactggatggtgac

SEQ ID NO: 714 - DNA, 980 bp, Artificial Sequence
  synthetic construct; Dicamba decarboxylase variant
atggctcaaggcaaagtggcactggaagaacatttcgcaatcccggaaacgctgcaagactcggcaggcttcgtcccgggcgactactggaaagaactgcagcatcgtctgctggatatccaagacacccgcctgaaactgatggatgcgcacggcatcgaaacgatgattctgtccctggctgcaccggctgttcaggcgattccggaccgtcgcaaagccattgaaatcgcacgtcgcgctaatgatttcctggcagaagaatgcgctaaacgtccggaccgctttctggcattcgcagcactgccgatgcaggatccagacgcagctagcgaagaactgcaacgttgtgtcaacgatctgggcttcgtgggtgccctggttaatggctttagcgtggaaggcgatggtcaaaccccgctgtattacgacctgccgcagtatcgcccgttctggggtgaagtcgaaaaactggatgtgccgttctatctgcatccgcgtaacccgctgccgcaggattcccgtatctacgacggtcacccgtggctgctgggtccgacctgggcgttcgcccaagaaacggcggtgcatgccctgcgtctgatggcatctggcctgtttgatgaacacccgcgtctgaatattatcctgggtcatctgggcgaaggtctgccgtacatgatgtaccgtatcgatcatcgtatcgcatgggttaaactgccgccgcgttatccggcaaaacgtcgctttatggactacttcaacgaaaattttcacattaccacgtcaggcaacttccgtacccagacgctgattgatgcaatcctggaaattggtgctgatcgcatcctgttctcgaccgactggccgtttgaaaacattgatcatgccgctgactggtttaatgctacgtctattgccgaagctgaccgtgtcaaaatcggccgcaccaatgccccgtcgtctgttcaaactggatg

SEQ ID NO: 715 - DNA, 984 bp, Artificial Sequence
  synthetic construct; Dicamba decarboxylase variant
atggctcaaggcaaagtggcactggaagaacatttcgcaatcccggaaacgctgcaagactcggcaggcttcgtcccgggcgactactggaaagaactgcagcatcgtctgctggatatccaagacacccgcctgaaactgatggatgcgcacggcatcgaaacgatgattctgtccctggctgcaccggctgttcaggcgattccggaccgtgtagaagccattgaaatcgcacgtcgcgctaatgatttcctggcagaagaatgcgctaaacgtccggaccgctttctggcattcgcagcactgccgctgcaggatccggacgcagctaccgaagaactgcaacgttgtgtcaacgatctgggcttcgtgggtgccctggttaatggctttagccaggaaggcgatggtcaaaccccgctgtattacgacctgccgcagtatcgcccgttctggggtgaagtcgaaaaactggatgtgccgttttatctgcatccgcgtaacccgctgccgcaggattcccgtatctacgacggtcacccgtggctgctgggtccgacctgggcgttcgcccaagaaacggcggtgcatgccctgcgtctgatggcatctggcctgtttgatgaacacccgcgtctgaatattatcctgggtcatatgggcgaaggtctgccgtacatgatgtaccgtatcgatcatcgtatcgcatgggttcacgagccgccgcgttatccggctaaacgtcgctttatggactacttcaacgaaaattttcacattaccacgtcaggcaacttccgtacccagacgctgattgatgcaatcctggaaattggtgctgatcgcatcctgttctcgaccgactggccgtttgaaaacattgatcatgccgctgactggtttaatgctacgtctattgccgaagctgaccgtgtcaaaatcggccgcaccaatgcccgtcgtctgttcaaactggatggcgct

SEQ ID NO: 716 - DNA, 984 bp, Artificial Sequence
  synthetic construct; Dicamba decarboxylase variant
atggctcaaggcaaagtggcactggaagaacatttcgcaatcccggagacgctgaacgactcggcaggcttcgtcccgggcgactactggaaagaactgcagcatcgtctgctggatatccaagacacccgcctgaaactgatggatgcgcacggcatcgaaacgatgattctgtccctggctgcaccggctgttcaggcgattccggaccgtcgcaaagccattgaaatcgcacgtcgcgctaatgatttcctggcagaagaatgcgctaaacgtccggaccgctttctggcattcgcagcactgccgctgcaggatccagacgcagctaccgaagaactgcaacgttgtgtcaacgatctgggcttcgtgggtgccctggttaatggctttagccaggaaggcgatggtcaaaccccgctgtattacgacctgccgcagtatcgcccgttctggggtgaagtcgaaaaactggatgtgccgttttatctgcatccgcgtaacccgctgccgcaggattcccgtatctacgacggtcacccgtggctgctgggtccgacctgggcgttcgcccaagaaacggcggtgcatgccctgcgtctgatggcatctggcctgtttgatgaacacccgcgtctgaatattatcctgggtcatctgggcgaaggtctgccgtacatgatgtaccgtatcgatcatcgtatcgcatgggttcacccaccgccgcgttatccggcaaaacgtcgctttatggactacttcaacgaaaattttcacattaccacgtcaggcaacttccgtacccagacgctgattgatgcaatcctggaaattggtgctgatcgcatcctgttctcgaccgactggccgtttgaaaacattgatcatgccactgactggtttaatgctacgtctattgccgaagctgaccgtgtcaaaatcggccgcaccaatgcccgtcgtctgttcaaactggatggtgac

SEQ ID NO: 717 - DNA, 984 bp, Artificial Sequence
  synthetic construct; Dicamba decarboxylase variant
atggctcaaggcaaagtggcactggaagaacatttcgcaatcccggcgacgctgaacgactcggcaggcttcgtcccgggcgactactggaaagaactgcagcatcgtctgctggatatccaagacacccgcctgaaactgatggatgcgcacggcatcggcacgatgattctgtccctggctgcaccggctgttcaggcgattccggaccgtcgcaaagccattgaaatcgcacgtcgcgctaatgatttcctggcagaagaatgcgctaaacgtccggaccgctttctggcattcgcagcactgccgctgcaggatccggacgcagctagcgaagaactgcaacgttgtgtcaacgacctgggcttcgtgggtgccctggttaatggctttagcgtggaaggcgatggtcaaaccccgctgtattacgacctgccgcagtatcgcccgttctggggtgaagtcgaaaaactggatgtgccgttttatctgcatccgcgtaacccgctgccgcaggattcccgtatctacgacggtcacccgtggctgctgggtccgacctgggcgttcgcccaagaaacggcggtgcatgccctgcgtctgatggcatctggcctgtttgatgaacacccgcgtctgaatattatcctgggtcatatgggcgaaggtctgccgtacatgatgtaccgtatcgatcatcgtatcgcatgggttcacgagccgccgcgttatccggcaaaacgtcgctttatggactacttcctggaaaattttcacattaccacgtcaggcaacttccgtacccagacgctgattgatgcaatcctggaaattggtgctgatcgcatcctgttctcgaccgactggccgtttgaaaacattgatcatgccgctgactggtttaatgctacgtctattgccgaagctgaccgtgtcaaaatcggccgcaccaatgcccgtcgtctgttcaaactggatggtgac

SEQ ID NO: 718 - DNA, 984 bp, Artificial Sequence
  synthetic construct; Dicamba decarboxylase variant
atggctcaaggcaaagtggcactggaagaacatttcgcaatcccggaaacgctgcaagactcggcaggcttcgtcccgggcgactactggaaagaactgcagcatcgtctgctggatatccaagacacccgcctgaaactgatggatgcgcacggcatcgaaacgatgattctgtccctggctgcaccggctgttcaggcgattccggaccgtcgcaaagccattgaaatcgcacgtcgcgctaatgatttcctggcagaagaatgcgctaaacgtccggaccgctttctggcattcgcagcactgccgctgcaggatccggacgcagctaccgaagaactgcaacgttgtgtcaacactctgggcttcgtgggtgccctggttaatggctttagcgtggaaggcgatggtcaaaccccgctgtattacgacctgccgcagtatcgcccgttctggggtgaagtcgaaaaactggatgtgccgttttatctgcatccgcgtaacccgctgccgcaggattcccgtatctacgacggtcacccgtggctgctgggtccgacctgggcgttcgcccaagaaacggcggtgcatgccctgcgtctgatggcatctggcctgtttgatgaacacccgcgtctgaatattatcctgggtcatatgggcgaaggtctgccgtacatgatgtaccgtatcgatcatcgtatcgcatgggttcacgagccgccgcgttatccggcaaaacgtcgctttatggactacttcaacgaaaattttcacattaccacgtcaggcaacttccgtacccagacgctgattgatgcaatcctggaaattggtgctgatcgcatcctgttctcgaccgactggccgtttgaaaacattgatcatgccgctgactggtttaatgctacgtctattgccgaagctgaccgtctgaaaatcggccgcaccaatgcccgtcgtctgttcaaactggatggtgac

SEQ ID NO: 719 - DNA, 984 bp, Artificial Sequence
  synthetic construct; Dicamba decarboxylase variant
atggctcaaggcaaagtggcactggaagaacatttcgcaatcccggagacgctgaacgactcggcaggcttcgtcccgggcgactactggaaagaactgcagcatcgtctgctggatatccaagacacccgcctgaaactgatggatgcgcacggcatcgaaacgatgattctgtccctggctgcaccggctgttcaggcgattccggaccgtcgcaaagccattgaaatcgcacgtcgcgctaatgatttcctggcagaagaatgcgctaaacgtccggaccgctttctggcattcgcagcactgccgctgcaggatccggacgcagctaccgaagaactgcaacgtaccgtcaacgacctgggcttcgtgggtgccctggttaatggctttagccaggaaggcgatggtcaaaccccgctgtattacgacctgccgcagtatcgcccgttctggggtgaagtcgaaaaactggatgtgccgttttatctgcatccgcgtaacccgctgccgcaggattcccgtatctacgacggtcacccgtggctgctgggtccgacctgggcgttcgcccaagaaacggcggtgcatgccctgcgtctgatggcatctggcctgtttgatgaacacccgcgtctgaatattatcctgggtcatatgggcgaaggtctgccgtacatgatgtaccgtatcgatcatcgtatcgcatgggtcaaactgccgccgcgttatccggcaaaacgtcgctttatggactacttcaacgaaaattttcacattaccacgtcaggcaacttccgtacccagacgctgattgatgcaatcctggaaattggtgctgatcgcatcctgttctcgaccgactggccgtttgaaaacattgatcatgccgctgactggtttaatgctacgtctattgccgaagctgaccgtctgaaaatcggccgcaccaatgcccgtcgtctgttcaaactggatctggac

SEQ ID NO: 720 - DNA, 984 bp, Artificial Sequence
  synthetic construct; Dicamba decarboxylase variant
atggctcaaggcaaagtggcactggaagaacatttcgcaatcccggaaacgctgcaagactcggcaggcttcgtcccgggcgactactggaaagaactgcagcatcgtctgctggatatccaagacacccgcctgaaactgatggatgcgcacggcatcgaaacgatgattctgtccctggctgcaccggctgttcaggcgattccggaccgtcgcaaagccattgaaatcgcacgtcgcgctaatgatttcctggcagaagaatgcgctaaacgtccggaccgctttctggcattcgcagcactgccgctgcaggatccggacgcagctaccgaagaactgcaacgttgcgtcaacactctgggcttcgtgggtgccctggttaatggctttagccaggaaggcgatggtcaaaccccgctgtattacgacctgccgcagtatcgcccgttctggggtgaagtcgaaaaactggatgtgccgttttatctgcatccgcgtaacccgctgccgcaggattcccgtatctacgacggtcacccgtggctgctgggtccgacctgggcgttcgcccaagaaacggcggtgcatgccctgcgtctgatggcatctggcctgtttgatgaacacccgcgtctgaatattatcctgggtcatctgggcgaaggtctgccgtacatgatgtaccgtatcgatcatcgtatcgcatgggttcacgagccgccgcgttatccggcaaaacgtcgctttatggactacttcaacgaaaattttcacattaccacgtcaggcaacttccgtacccagacgctgattgatgcaatcctggaaattggtgctgatcgcatcctgttctcgaccgactggccgtttgaaaacattgatcatgccgctgactggtttaatgctacgtctattgccgaagctgaccgtctgaaaatcggccgcaccaatgcccgtcgtctgttcaaactggatggcgct

SEQ ID NO: 721 - DNA, 984 bp, Artificial Sequence
  synthetic construct; Dicamba decarboxylase variant
atggctcaaggcaaagtggcactggaagaacatttcgcaatcccggaaacgctgcaagactcggcaggcttcgtcccgggcgactactggaaagaactgcagcatcgtctgctggatatccaagacacccgcctgaaactgatggatgcgcacggcatcgaaacgatgattctgtccctggctgcaccggctgttcaggcgattccggaccgtgtacaagccattgaaatcgcacgtcgcgctaatgatttcctggcagaagaatgcgctaaacgtccggaccgctttctggcattcgcagcactgccgctgcaggatccggacgcagctaccgaagaactgcaacgttgtgtcaacgatctgggcttcgtgggtgccctggttaatggctttagccaggaaggcgatggtcaaaccccgctgtattacgacctgccgcagtatcgcccgttctggggtgaagtcgaaaaactggatgtgccgttttatctgcatccgcgtaacccgctgccgcaggattcccgtatctacgacggtcacccgtggctgctgggtccgacctgggcgttcgcccaagaaacggcggtgcatgccctgcgtctgatggcatctggcctgtttgatgaacacccgcgtctgaatattatcctgggtcatatgggcgaaggtctgccgtacatgatgtaccgtatcgatcatcgtatcgcatgggttcacgagccgccgcgttatccggcaaaacgtcgctttatggactacttcaacgaaaattttcacattaccacgtcaggcaacttccgtacccagacgctgattgatgcaatcctggaaattggtgctgatcgcatcctgttctcgaccgactggccgtttgaaaacattgatcatgccgctgactggtttaatgctacgtctattgccgaagctgaccgtgtcaaaatcggccgcaccaatgcccgtcgtctgttcaaactggatggtgac

SEQ ID NO: 722 - DNA, 984 bp, Artificial Sequence
  synthetic construct; Dicamba decarboxylase variant
atggctcaaggcaaagtggcactggaagaacatttcgcaatcccggaaacgctgcaagactcggcaggcttcgtcccgggcgactactggaaagaactgcagcatcgtctgctggatatccaagacacccgcctgaaactgatggacgcgcacggcatcgaaacgatgattctgtccctggctgcaccggctgttcaggcgattccggaccgtcgcaaagccattgaaatcgcacgtcgcgctaatgatttcctggcagaagaatgcgctaaacgtccggaccgctttctggcattcgcagcactgccgctgcaggatccagacgcagctagcgaagaactgcaacgttgcgtcaacactctgggcttcgtgggtgccctggttaatggctttagcgtggaaggcgatggtcaaaccccgctgtattacgacctgccgcagtatcgcccgttctggggtgaagtcgaaaaactggatgtgccgttttatctgcatccgcgtaacccgctgccgcaggattcccgtatctacgacggtcacccgtggctgctgggtccgacctgggcgttcgcccaagaaacggcggtgcatgccctgcgtctgatggcatctggcctgtttgatgaacacccgcgtctgaatattatcctgggtcatatgggcgaaggtctgccgtacatgatgtaccgtatcgatcatcgtatcgcatgggttcacgagccgccgcgttatccggcaaaacgtcgctttatggactacttcaacgaaaattttcacattaccacgtcaggcaacttccgtacccagacgctgattgatgcaatcctggaaattggtgctgatcgcatcctgttcgcgaccgactggccgtttgaaaacattgatcatgccgctgactggtttaatgctacgtctattgccgaagctgaccgtgtcaaaatcggccgcaccaatgcccgtcgtctgttcaaactggatctggac

SEQ ID NO: 723 - DNA, 984 bp, Artificial Sequence
  synthetic construct; Dicamba decarboxylase variant
atggctcaaggcaaagtggcactggaagaacatttcgcaatcccggaaacgctgcaagactcggcaggcttcgtcccgggcgactactggaaagaactgcagcatcgtctgctggatatccaagacacccgcctgaaactgatggatgcgcacggcatcgaaacgatgattctgtccctggctgcaccggctgttcaggcgattccggaccgtcgcaaagccattgaaatcgcacgtcgcgctaatgatttcctggcagaagaatgcgctaaacgtccggaccgctttctggcattcgcagcactgccgctgcaggatccggacgcagctaccgaagaactgcaacgttgcgtcaacactctgggcttcgtgggtgccctggttaatggctttagccaggaaggcgatggtcaaaccccgctgtattacgacctgccgcagtatcgcccgttctggggtgaagtcgaaaaactggatgtgccgttttatctgcatccgcgtaacccgctgccgcaggattcccgtatctacgacggtcacccgtggctgctgggtccgacctgggcgttcgcccaagaaacggcggtgcatgccctgcgtctgatggcatctggcctgtttgatgaacacccgcgtctgaatattatcctgggtcatatgggcgaaggtctgccgtacatgatgtaccgtatcgatcatcgtatcgcatgggttaaactgccgccgcgttatccggcaaaacgtcgctttatggactacttcctggaaaattttcacattaccacgtcaggcaacttccgtacccagacgctgattgatgcaatcctggaaattggtgctgatcgcatcctgttctcgaccgactggccgtttgaaaacattgatcatgccgctgactggtttaatgctacgtctattgccgaagctgaccgtgtcaaaatcggccgcaccaatgcccgtcgtctgttcaaactggatggcgct

SEQ ID NO: 724 - DNA, 984 bp, Artificial Sequence
  synthetic construct; Dicamba decarboxylase variant
atggctcaaggcaaagtggcactggaagaacatttcgcaatcccggaaacgctgcaagactcggcaggcttcgtcccgggcgactactggaaagaactgcagcatcgtctgctggatatccaagacacccgcctgaaactgatggatgcgcacggcatcgaaacgatgattctgtccctggctgcaccggctgttcaggcgattccggaccgtcgcaaagccattgaaatcgcacgtcgcgctaatgatttcctggcagaagaatgcgctaaacgtccggaccgctttctggcattcgcagcactgccgctgcaggatccggacgcagctaccgaagaactgcaacgttgtgtcaacgatctgggcttcgtgggtgccctggttaatggctttagccaggaaggcgatggtcaaaccccgctgtattacgacctgccgcagtatcgcccgttctggggtgaagtcgaaaaactggatgtgccgttttatctgcatccgcgtaacccgctgccgcaggattcccgtatctacgacggtcacccgtggctgctgggtccgacctgggcgttcgcccaagaaacggcggtgcatgccctgcgtctgatggcatctggcctgtttgatgaacacccgcgtctgaatattatcctgggtcatctgggcgaaggtctgccgtacatgatgtaccgtatcgatcatcgtatcgcatgggttaaactgccgccgcgttatccggcaaaacgtcgctttatggactacttcaacgaaaattttcacattaccacgtcaggcaacttccgtacccagacgctgattgatgcaatcctggaaattggtgctgatcgcatcctgttctcgaccgactggccgtttgaaaacattgatcatgccgctgactggtttaacgctacgtctattgccgaagctgaccgtgtcaaaatcggccgcaccaatgcccgtcgtctgttcaaactggatctggac

SEQ ID NO: 725 - DNA, 984 bp, Artificial Sequence
  synthetic construct; Dicamba decarboxylase variant
atggctcaaggcaaagtggcactggaagaacatttcgcaatcccggaaacgctgcaagactcggcaggcttcgtcccgtctgattacctgaaagaactgcagcatcgtctgctggatatccaagacacccgcctgaaactgatggatgcgcacggcatcgaaacgatgattctgtccctggctgcagttggtgttcaggcgattccggaccgtcgcaaagccattgaaatcgcacgtcgcgctaatgatttcctggcagaagaatgcgctaaacgtccggaccgctttctggcattcgcagcactgccgctgcaggatccagacgcagctaccgaagaactgcaacgttgcgtcaacgatctgggcttcgtgggtgccctggttaatggctttagccaggaaggcgatggtcaaaccccgctgtattacgacctgccgcagtatcgcccgttctggggtgaagtcgaaaaactggatgtgccgttttatctgcatccgcgtaacccgctgccgcaggattcccgtatctacgacggtcacccgtggctgctgggtccgacctgggcgttcgcccaagaaacggcggtgcatgccctgcgtctgatggcatctggcctgtttgatgaacacccgcgtctgaatattatcctgggtcatctgggcgaaggtctgccgtacatgatgtaccgtatcgatcatcgtatcgcatgggttcacgagccgccgcgttatccggcaaaacgtcgctttatggactacttcaacgaaaattttcacattaccacgtcaggcaacttccgtacccagacgctgattgatgcaatcctggaaattggtgctgatcgcatcctgttctcgaccgactggccgtttgaaaacattgatcatgccgctgactggtttaatgctacgtctattgccgaagctgaccgtgtcaaaatcggccgcaccaatgcccgtcgtctgttcaaactggatggtgac

SEQ ID NO: 726 - DNA, 984 bp, Artificial Sequence
  synthetic construct; Dicamba decarboxylase variant
atggctcaaggcaaagtggcactggaagagcatttcgcaatcccggaaacgctgaacgactcggcaggcttcgtcccgggcgactactggaaagaactgcagcatcgtctgctggatatccaagacacccgcctgaaactgatggatgcgcacggcatcgaaacgatgattctgtccctggctgcaccggctgttcaggcgattccggaccgtcgcaaagccattgaaatcgcacgtcgcgctaatgatttcctggcagaagaatgcgctaaacgtccggaccgctttctggcattcgcagcactgccgctgcaggatccggacgcagctaccgaagaactgcaacgttgcgtcaacactctgggcttcgtgggtgccctggttaatggctttagccaggaaggcgatggtcaaaccccgctgtattacgacctgccgcagtatcgcccgttctggggtgaagtcgaaaaactggatgtgccgttttatctgcatccgcgtaacccgctgccgcaggattcccgtatctacgacggtcacccgtggctgctgggtccgacctgggcgttcgcccaagaaacggcggtgcatgccctgcgtctgatggcatctggcctgtttgatgaacacccgcgtctgaatattatcctgggtcatctgggcgaaggtctgccgtacatgatgtaccgtatcgatcatcgtatcgcatgggttaaactgccgccgcgttatccggcaaaacgtcgctttatggactacttcaacgaaaattttcacattaccacgtcaggcaacttccgtacccagacgctgattgatgcaatcctggaaattggtgctgatcgcatcctgttctcgaccgactggccgtttgaaaacattgatcatgccgctgactggtttaatgctacgtctattgccgaagctgaccgtgtcaaaatcggccgcaccaatgcccgtcgtctgttcaaactggatggcgct

SEQ ID NO: 727 - DNA, 984 bp, Artificial Sequence
  synthetic construct; Dicamba decarboxylase variant
atggctcaaggcaaagtggcactggaagaacatttcgcaatcccggaaacgctgcaagacacggcaggcttcgtcccgggcgactactggaaagaactgcagcatcgtctgctggatatccaagacacccgcctgaaactgatggatgcgcacggcatcgaaacgatgattctgtccctggctgcaccggctgttcaggcgattccggaccgtcgcaaagccattgaaatcgcacgtcgcgctaatgatttcctggcagaagaatgcgctaaacgtccggaccgctttctggcattcgcagcactgccgctgcaggatccggacgcagctaccgaagaactgcaacgtaccgtcaacgatctgggcttcgtgggtgccctggttaatggctttagccaggaaggcgatggtcaaaccccgctgtattacgacctgccgcagtatcgcccgttctggggtgaagtcgaaaaactggatgtgccgttttatctgcatccgcgtaacccgctgccgcaggattcccgtatctacgacggtcacccgtggctgctgggtccgacctgggcgttcgcccaagaaacggcggtgcatgccctgcgtctgatggcatctggcctgtttgatgaacacccgcgtctgaatattatcctgggtcatatgggcgaaggtctgccgtacatgatgtaccgtatcgatcatcgtatcgcatgggttaaactgccgccgcgttatccggcaaaacgtcgctttatggactacttcaacgaaaattttcacattaccacgtcaggcaacttccgtacccagacgctgattgatgcaatcctggaaattggtgctgatcgcatcctgttctcgaccgactggccgtttgaaaacattgatcatgccgctgactggtttaatgctacgtctattgccgaagctgaccgtctgaaaatcggccgcaccaatgcccgtcgtctgttcaaactggatggtgac

SEQ ID NO: 728 - DNA, 984 bp, Artificial Sequence
  synthetic construct; Dicamba decarboxylase variant
atggctcaaggcaaagtggcactggaagaacatttcgcaatcccggaaacgctgcaagactcggcaggcttcgtcccgggcgactactggaaagaactgcagcatcgtctgctggatatccaagacacccgcctgaaactgatggatgcgcacggcatcgaaacgatgattctgtccctggctgcaccggctgttcaggcgattccggaccgtcgcaaagccattgaaatcgcacgtcgcgctaatgatttcctggcagaagaatgcgctaaacgtccggaccgctttctggcattcgcagcactgccgatgcaggatgtggacgcagctaccgaagaactgcaacgttgcgtcaacgatctgggcttcgtgggtgccctggttaatggctttagcgtggaaggcgatggtcaaaccccgctgtattacgacctgccgcagtatcgcccgttctggggtgaagtcgaaaaactggatgtgccgttttatctgcatccgcgtaacccgctgccgcaggattctcgtatctacgacggtcacccgtggctgctgggtccgacctgggcgttcgcccaagaaacggcggtgcatgccctgcgtctgatggcatctggcctgtttgatgaacacccgcgtctgaatattatcctgggtcatctgggcgaaggtctgccgtacatgatgtaccgtatcgatcatcgtatcgcatgggttaaactgccgccgcgttatccggcaaaacgtcgctttatggactacttcaacgaaaattttcacattaccacgtcaggcaacttccgtacccagacgctgattgatgcaatcctggaaattggtgctgatcgcatcctgttctcgaccgactggccgtttgaaaacattgatcatgccgctgactggtttaatgctacgtctattgccgaagctgaccgtgtcaaaatcggccgcaccaatgcccgtcgtctgttcaaactggatctggac

SEQ ID NO: 729 - DNA, 984 bp, Artificial Sequence
  synthetic construct; Dicamba decarboxylase variant
atggctcaaggcaaagtggcactggaagaacatttcgcaatcccggaaacgctgcaagactcggcaggcttcgtcccgggcgactactggaaagaactgcagcatcgtctgctggatatccaagacacccgcctgaaactgatggatgcgcacggcatcgaaacgatggttctgtccctggctgcaccggctgttcaggcgattccggaccgtcgcaaagccattgaaatcgcacgtcgcgctaatgatatgctggcagaagaatgcgctaaacgtccggaccgctttctggcattcgcagcactgccgctgcaggatccggacgcagctaccgaagaactgcaacgttgtgtcaacgatctgggcttcgtgggtgccctggttaatggctttagccaggaaggcgatggtcaaaccccgctgtattacgacctgccgcagtatcgcccgttctggggtgaagtcgaaaaactggatgtgccgttttatctgcatccgcgtaacccgctgccgcaggattcccgtatctacgacggtcacccgtggctgctgggtccgacctgggcgttcgcccaagaaacggcggtgcatgccctgcgtctgatggcatctggcctgtttgatgaacacccgcgtctgaatattatcctgggtcatatgggcgaaggtctgccgtacatgatgtaccgtatcgatcatcgtatcgcatgggttcacgagccgccgcgttatccggcaaaacgtcgctttatggactacttcaacgaaaattttcacattaccacgtcaggcaacttccgtacccagacgctgattgatgcaatcctggaaattggtgctgatcgcatcctgttctcgaccgactggccgtttgaaaacattgatcatgccgctgcctggtttaatgctacgtctattgccgaagctgaccgtgtcaaaatcggccgcaccaatgcccgtcgtctgttcaaactggatggcgct

SEQ ID NO: 730 - DNA, 984 bp, Artificial Sequence
  synthetic construct; Dicamba decarboxylase variant
atggctcaaggcaaagtggcactggaagaacatttcgcaatcccggaaacgctgcaagactcggcaggcttcgtcccgggcgactactggaaagaactgcagcatcgtctgctggatatccaagacacccgcctgaaactgatggatgcgcacggcatcgaaacgatgattctgtccctggctgcaccggctgttcaggcgattccggaccgtcgtaaagccattgaaatcgcacgtcgcgctaatgatttgctggcagaagaatgcgctaaacgtccggaccgctttctggcattcgcagcactgccgatgcaggatccggacgcagctaccgaagaactgcaacgttgtgtcaacgatctgggcttcgtgggtgccctggttaatggctttagccaggaaggcgatggtcaaaccccgctgtattacgacctgccgcagtatcgcccgttctggggtgaagtcgaaaaactggatgtgccgttttatctgcatccgcgtaacccgctgccgcaggattcccgtatctacgacggtcacccgtggctgctgggtccgacctgggcgttcgcccaagaaacggcggtgcatgccctgcgtctgatggcatctggcctgtttgatgaacacccgcgtctgaatattatcctgggtcatatgggcgaaggtctgccgtacatgatgtaccgtatcgatcatcgtatcgcatgggttaaactgccgccgcgttatccggcaaaacgtcgctttatggactacttcaacgaaaattttcacattaccacgtcaggcaacttccgtacccagacgctgattgatgcaatcctggaaattggtgctgatcgcatcctgttctcgaccgactggccgtttgaaaacattgatcatgccgctgactggtttaatgctacgtctattgccgaagctgaccgtgtcaaaatcggccgcaccaatgcccgtcgtctgttcaaactggatggcgct

SEQ ID NO: 731 - DNA, 984 bp, Artificial Sequence
  synthetic construct; Dicamba decarboxylase variant
atggctcaaggcaaagtggcactggaagaacatttcgcaatcccggaaacgctgcaagactcggcaggcttcgtcccgggcgactactggaaagaactgcagcatcgtctgctggatatccaagacacccgcctgaaactgatggataaacacggcatcgaaacgatgattctgtccctggctgcaccggctgttcaggcgattccggaccgtcgcaaagccattgaaatcgcacgtcgcgctaatgatatgctggcagaagaatgcgctaaacgtccggaccgctttctggcattcgcagcactgccgctgcaggatccggacgcagctaccgaagaactgcaacgttgtgtcaacgatctgggcttcgtgggtgccctggttaatggctttagccaggaaggcgatggtcaaaccccgctgtattacgacctgccgcagtatcgcccgttctggggtgaagtcgaaaaactggatgtgccgttttatctgcatccgcgtaacccgctgccgcaggattcccgtatctacgacggtcacccgtggctgctgggtccgacctgggcgttcgcccaagaaacggcggtgcatgccctgcgtctgatggcatctggcctgtttgatgaacgcccgcgtctgaatattatcctgggtcatatgggcgaaggtctgccgtacatgatgtaccgtatcgatcatcgtatcgcatgggttcacgagccgccgcgttatccggcaaaacgtcgctttatggactacttcaacgaaaattttcacattaccacgtcaggcaacttccgtacccagacgctgattgatgcaatcctggaaattggtgctgatcgcatcctgttctcgaccgactggccgtttgaaaacattgatcatgccactgcctggtttaatgctacgtctattgccgaagctgaccgtgtcaaaatcggccgcaccaatgcccgtcgtctgttcaaactggatggcgct

SEQ ID NO: 732 - DNA, 984 bp, Artificial Sequence
  synthetic construct; Dicamba decarboxylase variant
atggctcaaggcaaagtggcactggaagaacatttcgcaatcccggaaacgctgcaagactcggcaggcttcgtcccgggcgactactggaaagaactgcagcatcgtctgctggatatccaagacacccgcctgaaactgatggatgcgcacggcatcgaaacgatgattctgtccctggctgcaccggctgttcaggcgattccggaccgtcgcaaagccattgaaatcgcacgtcgcgctaatgatttcctggcagaagaatgcgctaaacgtccggaccgctttctggcattcgcagcactgccgctgcaggatccggacgcagctaccgaagaactgcaacgttgtgtcaacgatctgggcttcgtgggtgccctggttaatggctttagccaggaaggcgatggtcaaaccccgctgtattacgacctgccgcagtatcgcccgttctggggtgaagtcgaaaaactggatgtgccgttttatctgcatccgcgtaacccgctgccgcaggattcccgtatctacgacggtcacccgtggctgctgggtccgacctgggcgttcgcccaagagacggcggtgcatgccctgcgtctgatggcatctggcctgtttgatgaacacccgcgtctgaatattatcctgggtcatatgggcgaaggtctgccgtacatgatgtaccgtatcgatcatcgtatcgcatgggttcacgagccgccgcgttatccggcaaaacgtcgctttatggactacttcaacgaaaattttcacattaccacgtcaggcaacttccgtacccagacgctgattgatgcaatcctggaaattggtgctgatcgcatcctgttctcgaccgactggccgtttgaaaacattgatcatgccgctgcctggtttaatgctacgtctattgccgaagctgaccgtctgaaaatcggccgcaccaatgcccgtcgtctgttcaaactggatggcgct

SEQ ID NO: 733 - DNA, 984 bp, Artificial Sequence
  synthetic construct; Dicamba decarboxylase variant
atggctcaaggcaaagtggcactggaagaacatttcgcaatcccggaaacgctgcaagactcggcaggcttcgtcccgggcgactactggaaagaactgcagcatcgtctgctggatatccaagacacccgcctgcgcctgatggatgcgcacggcatcgaaacgatgattctgtccctggctgcaccggctgttcaggcgattccggaccgtcgcaaagccattgaaatcgcacgtcgcgctaatgatatgctggcagaagaatgcgctaaacgtccggaccgctttctggcattcgcagcactgccgctgcaggatccggacgcagctaccgaagaactgcaacgttgtgtcaacgatctgggcttcgtgggtgccctggttaatggctttagccaggaaggcgatggtcaaaccccgctgtattacgacctgccgcagtatcgcccgttctggggtgaagtcgaaaaactggatgtgccgttttatctgcatccgcgtaacccgctgccgcaggattcccgtatctacgacggtcacccgtggctgctgggtccgacctgggcgttcgcccaagaaacggcggtgcatgccctgcgtctgatggcatctggcctgtttgatgaacacccgcgtctgaatattatcctgggtcatctgggcgaaggtctgccgtacatgatgtaccgtatcgatcatcgtatcgcatgggttcacgagccgccgcgttatccggcaaaacgtcgctttatggactacttcaacgaaaattttcacattaccacgtcaggcaacttccgtacccagacgctgattgatgcaatcctggaaattggtgctgatcgcatcctgttctcgaccgactggccgtttgaaaacattgatcatgccgctgactggtttaatgctacgtctattgccgaagctgaccgtctgaaaatcggccgcaccaatgcccgtcgtctgttcaaactggatggtgac

SEQ ID NO: 734 - DNA, 984 bp, Artificial Sequence
  synthetic construct; Dicamba decarboxylase variant
atggctcaaggcaaagtggcactggaagaacatttcgcaatcccggaaacgctgcaagactcggcaggcttcgtcccgggcgactactggaaagaactgcagcatcgtctgctggatatccaagacacccgcctgcgcctgatggatgcgcacggcatcgaaacgatgattctgtccctggctgcaccggctgttcaggcgattccggaccgtcgcaaagccattgaaatcgcacgtcgcgctaatgatttcctggcagaagaatgcgctaaacgtccggaccgctttctggcattcgcagcactgccgctgcaggatccggacgcagctaccgaagaactgcaacgttgtgtcaacgatctgggcttcgtgggtgccctggttaatggctttagccaggaaggcgatggtcaaaccccgctgtattacgacctgccgcagtatcgcccgttctggggtgaagtcgaaaaactggatgtgccgttttatctgcatccgcgtaacccgctgccgcaggattcccgtatctacgacggtcacccgtggctgctgggtccgacctgggcgttcgcccaagaaacggcggtgcatgccctgcgtctgatggcatctggcctgtttgatgaacacccgcgtctgaatattatcctgggtcatatgggcgaaggtctgccgtacatgatgtaccgtatcgatcatcgtatcgcatgggttaaactgccgccgcgttatccggcaaaacgtcgctttatggactacttcaacgaaaattttcacattaccacgtcaggcaacttccgtacccagacgctgattgatgcaatcctggaaattggtgctgatcgcatcctgttctcgaccgactggccgtttgaaaacattgatcatgccactgactggtttaatgctacgtctattgccgaagctgaccgtgtcaaaatcggccgcaccaatgcccgtcgtctgttcaaactggatctggac

SEQ ID NO: 735 - DNA, 984 bp, Artificial Sequence
  synthetic construct; Dicamba decarboxylase variant
atggctcaaggcaaagtggcactggaagaacatttcgcaatcccggagacgctgaacgactcggcaggcttcgtcccgggcgactactggaaagaactgcagcatcgtctgctggatatccaagacacccgcctgaaactgatggatgcgcacggcatcgaaacgatgattctgtccctggctgcaccggctgttcaggcgattccggaccgtcgcaaagccattgaaatcgcacgtcgcgctaatgatttcctggcagaagaatgcgctaaacgtccggaccgctttctggcattcgcagcactgccgctgcaggatccggacgcagctagcgaagaactgcaacgttgtgtcaacgatctgggcttcgtgggtgccctggttaatggctttagcgtggaaggcgatggtcaaaccccgctgtattacgacctgccgcagtatcgcccgttctggggtgaagtcgaaaaactggatgtgccgttttatctgcatccgcgtaacccgctgccgcaggattcccgtatctacgacggtcacccgtggctgctgggtccgacctgggcgttcgcccaagaaacggcggtgcatgccctgcgtctgatggcatctggcctgtttgatgaacacccgcgtctgaatattatcctgggtcatatgggcgaaggtctgccgtacatgatgtaccgtatcgatcatcgtatcgcatgggttaaactgccgccgcgttatccggcaaaacgtcgctttatggactacttcaacgaaaattttcacattaccacgtcaggcaacttccgtacccagacgctgattgatgcaatcctggaaattggtgctgatcgcatcctgttctcgaccgactggccgtttgaaaacattgatcatgccgctgactggtttaatgctacgtctattgccgaagctgaccgtctgaaaatcggccgcaccaatgcccgtcgtctgttcaaactggatggtgac

SEQ ID NO: 736 - DNA, 984 bp, Artificial Sequence
  synthetic construct; Dicamba decarboxylase variant
atggctcaaggcaaagtggcactggaagaacatttcgcaatcccggaaacgctgcaagactcggcaggcttcgtcccgggcgactactggaaagaactgcagcatcgtctgctggatatccaagacacccgcctgaaactgatggatgcgcacggcatcgagacgatgattctgtccctggctgcaccggctgttcaggcgattccggaccgtcgtcaagccattgaaatcgcacgtcgcgctaatgatttcctggcagaagaatgcgctaaacgtccggaccgctttctggcattcgcagcactgccgctgcaggatccggacgcagctaccgaagaactgcaacgttgcgtcaacgatctgggcttcgtgggtgccctggttaatggctttagccaggaaggcgatggtcaaaccccgctgtattacgacctgccgcagtatcgcccgttctggggtgaagtcgaaaaactggatgtgccgttttatctgcatccgcgtaacccgctgccgcaggattcccgtatctacgacggtcacccgtggctgctgggtccgacctgggcgttcgcccaagaaacggcggtgcatgccctgcgtctgatggcatctggcctgtttgatgaacacccgcgtctgaatattatcctgggtcatctgggcgaaggtctgccgtacatgatgtaccgtatcgatcatcgtatcgcatgggttaaactgccgccgcgttatccggcaaaacgtcgctttatggactacttcaacgaaaattttcacattaccacgtcaggcaacttccgtacccagacgctgattgatgcaatcctggaaattggtgctgatcgcatcctgttctcgaccgactggccgtttgaaaacattgatcatgccgctgactggtttaatgctacgtctattgccgaagctgaccgtgtcaaaatcggccgcaccaatgcccgtcgtctgttcaaactggatggtgac

SEQ ID NO: 737 - DNA, 984 bp, Artificial Sequence
  synthetic construct; Dicamba decarboxylase variant
atggctcaaggcaaagtggcactggaagaacatttcgcaatcccggaaacgctgcaagactcggcaggcttcgtcccgggcgactactggaaagaactgcagcatcgtctgctggatatccaagacacccgcctgaaactgatggatgcgcacggcatcgaaacgatgattctgtccctggctgcaccggctgttcaggcgattccggaccgtcgtcaagccattgaaatcgcacgtcgcgctaatgatttcctggcagaagaatgcgctaaacgtccggaccgctttctggcattcgcagcactgccgctgcaggatccagacgcagctagcgaagaactgcaacgttgtgtcaacgatctgggcttcgtgggtgccctggttaatggctttagcgtggaaggcgatggtcaaaccccgctgtattacgacctgccgcagtatcgcccgttctggggtgaagtcgaaaaactggatgtgccgttttatctgcatccgcgtaacccgctgccgcaggattcccgtatctacgacggtcacccgtggctgctgggtccgacctgggcgttcgcccaagaaacggcggtgcatgccctgcgtctgatggcatctggcctgtttgatgaacacccgcgtctgaatattatcctgggtcatatgggcgaaggtctgccgtacatgatgtaccgtatcgatcatcgtatcgcatgggttcacgagccgccgcgttatccggcaaaacgtcgctttatggactacttcaacgaaaattttcacattaccacgtcaggcaacttccgtacccagacgctgattgatgcaatcctggaaattggtgctgatcgcatcctgttctcgaccgactggccgtttgaaaacattgatcatgccactgactggtttaatgctacgtctattgccgaagctgaccgtgtcaaaatcggccgcaccaatgcccgtcgtctgttcaaactggatggcgct

SEQ ID NO: 738 - DNA, 984 bp, Artificial Sequence
  synthetic construct; Dicamba decarboxylase variant
atggctcaaggcaaagtggcactggaagaacatttcgcaatcccggaaacgctgcaagactcggcaggcttcgtcccgggcgactactggaaagaactgcagcatcgtctgctggatatccaagacacccgcctgaaactgatggatgcgcacggcatcgaaacgatgattctgtccctggctgcaccggctgttcaggcgattccggaccgtcgcaaagccattgaaatcgcacgtcgcgctaatgatttcctggcagaagaatgcgctaaacgtccggaccgctttctggcattcgcagcactgccgctgcaggatccggacgcagctagcgaagaactgcaacgttgtgtcaacgatctgggattcgtgggtgccctggttaatggctttagcgtggaaggcgatggtcaaaccccgctgtattacgacctgccgcagtatcgcccgttctggggtgaagtcgaaaaactggatgtgccgttttatctgcatccgcgtaacccgctgccgcaggattcccgtatctacgacggtcacccgtggctgctgggtccgacctgggcgttcgcccaagaaacggcggtgcatgccctgcgtctgatggcatctggcctgtttgatgaacacccgcgtctgaatattatcctgggtcatatgggcgaaggtctgccgtacatgatgtaccgtatcgatcatcgtatcgcatgggttaaactgccgccgcgttatccggcaaaacgtcgctttatggactacttcaacgaaaattttcacattaccacgtcaggcaacttccgtacccagacgctgattgatgcaatcctggaaattggtgctgatcgcatcctgttctcgaccgactggccgtttgaaaacattgatcatgccgctgactggtttaatgctacgtctattgccgaagctgaccgtgtcaaaatcggccgcaccaatgcccgtcgtctgttcaaactggatggcgct

SEQ ID NO: 739 - DNA, 984 bp, Artificial Sequence
  synthetic construct; Dicamba decarboxylase variant
atggctcaaggcaaagtggcactggaagaacatttcgcaatcccggaaacgctgcaagactcggcaggcttcgtcccgggcgactactggaaagaactgcagcatcgtctgctggatatccaagacacccgcctgcgcctgatggatgcgcaccaaatcgagacgatgattctgtccctggctgcaccgggtgttcaggcgattccggaccgtcgcaaagccattgaaatcgcacgtcgcgctaatgatttcctggcagaagaatgcgctaaacgtccggaccgctttctggcattcgcagcactgccgctgcaggatccggacgcagctaccgaagaactgcaacgttgtgtcaacgatctgggcttcgtgggtgccctggttaatggctttagccaggaaggcgatggtcaaaccccgctgtattacgacctgccgcagtatcgcccgttctggggtgaagtcgaaaaactggatgtgccgttttatctgcatccgcgtaacccgctgccgcaggattcccgtatctacgacggtcacccgtggctgctgggtccgacctgggcgttcgcccaagaaacggcggtgcatgccctgcgtctgatggcatctggcctgtttgatgaacacccgcgtctgaatattatcctgggtcatatgggcgaaggtctgccgtacatgatgtaccgtatcgatcatcgtatcgcatgggttcacgagccgccgcgttatccggcaaaacgtcgctttatggactacttcaacgaaaattttcacattaccacgtcaggcaacttccgtacccagacgctgattgatgcaatcctggaaattggtgctgatcgcatcctgttctcgaccgactggccgtttgaaaacattgatcatgccgctgactggtttaatgctacgtctattgccgaagctgaccgtctgaaaatcggccgcaccaatgcccgtcgtctgttcaaactggatggcgct

SEQ ID NO: 740 - DNA, 984 bp, Artificial Sequence
  synthetic construct; Dicamba decarboxylase variant
atggctcaaggcaaagtggcactggaagaacatttcgcaatcccggagacgctgcaggactcggcaggcttcgtcccgggcgactactggaaagaactgcagcatcgtctgctggatatccaagacacccgcctgaaactgatggatgcgcacggcatcgaaacgatgattctgtccctggctgcaccggctgttcaggcgattccggaccgtcgcaaagccattgaaatcgcacgtcgcgctaatgatatgctggcagaagaatgcgctaaacgtccggaccgctttctggcattcgcagcactgccgctgcaggatccggacgcagctaccgaagaactgcaacgttgtgtcaacgatctgggcttcgtgggtgccctggttaatggctttagcgtggaaggcgatggtcaaaccccgctgtattacgacctgccgcagtatcgcccgttctggggtgaagtcgaaaaactggatgtgccgttttatctgcatccgcgtaacccgctgccgcaggattcccgtatctacgacggtcacccgtggctgctgggtccgacctgggcgttcgcccaagaaacggcggtgcatgccctgcgtctgatggcatctggcctgtttgatgaacacccgcgtctgaatattatcctgggtcatctgggcgaaggtctgccgtacatgatgtaccgtatcgatcatcgtatcgcatgggttcacgagccgccgcgttatccggcaaaacgtcgctttatggactacttcaacgaaaattttcacattaccacgtcaggcaacttccgtacccagacgctgattgatgcaatcctggaaattggtgctgatcgcatcctgttctcgaccgactggccgtttgaaaacattgatcatgccgctgactggtttaatgctacgtctattgccgaagctgaccgtctgaaaatcggccgcaccaatgcccgtcgtctgttcaaactggatggcgct

SEQ ID NO: 741 - DNA, 984 bp, Artificial Sequence
  synthetic construct; Dicamba decarboxylase variant
atggctcaaggcaaagtggcactggaagaacatttcgcaatcccggagacgctgcaagactcggcaggcttcgtcccgggcgactactggaaagaactgcagcatcgtctgctggatatccaagacacccgcctgaaactgatggatgcgcacggcatcgaaacgatgattctgtccctggctgcaccggctgttcaggcgattccggaccgtcgcaaagccattgaaatcgcacgtcgcgctaatgatttcctggcagaagaatgcgctaaacgtccggaccgctttctggcattcgcagcactgccgctgcaggatccggacgcagctaccgaagaactgcaacgtaccgtcaacaatctgggcttcgtgggtgccctggttaatggctttagccaggaaggcgatggtcaaaccccgctgtattacgacctgccgcagtatcgcccgttctggggtgaagtcgaaaaactggatgtgccgttttatctgcatccgcgtaacccgctgccgcaggattcccgtatctacgacggtcacccgtggctgctgggtccgacctgggcgttcgcccaagaaacggcggtgcatgccctgcgtctgatggcatctggcctgtttgatgaacacccgcgtctgaacattatcctgggtcatatgggcgaaggtctgccgtacatgatgtaccgtatcgatcatcgtatcgcatgggttcaagagccgccgcgttatccggcaaaacgtcgctttatggactacttcaacgaaaattttcacattaccacgtcaggcaacttccgtacccagacgctgattgatgcaatcctggaaattggtgctgatcgcatcctgttctcgaccgactggccgtttgaaaacattgatcatgccgctgactggtttaatgctacgtctattgccgaagctgaccgtgtcaaaatcggccgcaccaatgcccgtcgtctgttcaaactggatggggat

SEQ ID NO: 742 - DNA, 984 bp, Artificial Sequence
  synthetic construct; Dicamba decarboxylase variant
atggctcaaggcaaagtggcactggaagaacatttcgcaatcccggaaacgctgcaagactcggcaggcttcgtcccgggcgactactggaaagaactgcagcatcgtctgctggatatccaagacacccgcctgaaactgatggatgcgcacggcatcgaaacgatgattctgtccctggctgcaccggctgttcaggcgattccggaccgtcgcaaagccattgaaatcgcacgtcgcgctaatgatttcctggcagaagaatgcgctaaacgtccggaccgctttctggcattcgcagcactgccgctgcaggatccggacgcagctaccgaagaactgcaacgttgcgtcaacactctgggcttcgtgggtgccctggttaatggctttagccaggaaggcgatggtcaaaccccgctgtattacgacctgccgcagtatcgcccgttctggggtgaagtcgaaaaactggatgtgccgttttatctgcatccgcgtaacccgctgccgcaggattcccgtatctacgacggtcacccgtggctgctgggtccgacctgggcgttcgcccaagaaacggcggtgcatgccctgcgtctgatggcatctggcctgtttgatgaacacccgcgtctgaatattatcctgggtcatatgggcgaaggtctgccgtacatgatgtaccgtatcgatcatcgtatcgcatgggttaaactgccgccgcgttatccggcaaaacgtcgctttatggactacttcaacgaaaattttcacattaccacgtcaggcaacttccgtacccagacgctgattgatgcaatcctggaaattggtgctgatcgcatcctgttctcgaccgactggccgtttgaaaacattgatcatgccgctgactggtttaatgctacgtctattgccgaagctgaccgtctgaaaatcggccgcaccaatgcccgtcgtctgttcaaactggatctggac

SEQ ID NO: 743 - DNA, 984 bp, Artificial Sequence
  synthetic construct; Dicamba decarboxylase variant
atggctcaaggcaaagtggcactggaagaacatttcgcaatcccggaaacgctgcaagactcggcaggcttcgtcccgggcgactactggaaagaactgcagcatcgtctgctggatatccaagacacccgcctgaaactgatggatgcgcacggcatcggcacgatgattctgtccctggctgcaccggctgttcaggcgattccggaccgtcgcaaagccattgaaatcgcacgtcgcgctaatgatttcctggcagaagaatgcgctaaacgtccggaccgctttctggcattcgcagcactgccgctgcaggatccggacgcagctaccgaagaactgcaacgttgtgtcaacgatctgggcttcgtgggtgccctggttaatggctttagccaggaaggcgatggtcaaaccccgctgtattacgacctgccgcagtatcgcccgttctggggtgaagtcgaaaaactggatgtgccgttttatctgcatccgcgtaacccgctgccgcaggattcccgtatctacgacggtcacccgtggctgctgggtccgacctgggcgttcgcccaagaaacggcggtgcatgccctgcgtctgatggcatctggcctgtttgatgaacacccgcgtctgaatattatcctgggtcatatgggcgaaggtctgccgtacatgatgtaccgtatcgatcatcgtatcgcatgggttaaactgccgccgcgttatccggcaaaacgtcgctttatggactacttcaacgaaaattttcacattaccacgtcaggcaacttccgtacccagacgctgattgatgcaatcctggaaattggtgctgatcgcatcctgttctcgaccgactggccgtttgaaaacattgatcatgccgctgactggtttaatgctacgtctattgccgaagctgaccgtgtcaaaatcggccgcaccaatgcccgtcgtctgttcaaactggatggtgac

SEQ ID NO: 744 - DNA, 984 bp, Artificial Sequence
  synthetic construct; Dicamba decarboxylase variant
atggctcaaggcaaagtggcactggaagaacatttcgcaatcccggaaacgctgcaagactcggcaggcttcgtcccgggcgactactggaaagaactgcagcatcgtctgctggatatccaagacacccgcctgaaactgatggataaacacggcatcgaaacgatgattctgtccctggctgcaccggctgttcaggcgattccggaccgtcgcaaagccattgaaatcgcacgtcgcgctaatgatttcctggcagaagaatgcgctaaacgtccggaccgctttctggcattcgcagcactgccgctgcaggatccggacgcagctaccgaagaactgcaacgttgtgtcaacgatctgggcttcgtgggtgccctggttaatggctttagccaggaaggcgatggtcaaaccccgctgtattacgacctgccgcagtatcgcccgttctggggtgaagtcgaaaaactggatgtgccgttttatctgcatccgcgtaacccgctgccgcaggattcccgtatctacgacggtcacccgtggctgctgggtccgacctgggcgttcgcccaagaaacggcggtgcatgccctgcgtctgatggcatctggcctgtttgatgaacacccgcgtctgaatattatcctgggtcatatgggcgaaggtctgccgtacatgatgtaccgtatcgatcatcgtatcgcatgggttcacgagccgccgcgttatccggcaaaacgtcgctttatggactacttcaacgaaaattttcacattaccacgtcaggcaacttccgtacccagacgctgattgatgcaatcctggaaattggtgctgatcgcatcctgttctcgaccgactggccgtttgaaaacattgatcatgccactgactggtttaatgctacgtctattgccgaagctgaccgtgtcaaaatcggccgcaccaatgcccgtcgtctgttcaaactggatctggac

SEQ ID NO: 745 - DNA, 984 bp, Artificial Sequence
  synthetic construct; Dicamba decarboxylase variant
atggctcaaggcaaagtggcactggaagaacatttcgcaatcccggaaacgctgcaagactcggcaggcttcgtcccgggcgactactggaaagaactgcagcatcgtctgctggatatccaagacacccgcctgaaactgatggatgcgcacggcatcgaaacgatgattctgtccctggctgcaccggctgttcaggcgattccggaccgtcgcaaagccattgaaatcgcacgtcgcgctaatgatttcctggcagaagaatgcgctaaacgtccggaccgctttctggcattcgcagcactgccgctgcaggatccggacgcagctaccgaagaactgcaacgttgtgtcaacgatctgggcttcgtgggtgccctggttaatggctttagccaggaaggcgatggtcaaaccccgctgtattacgacctgccgcagtatcgcccgttctggggtgaagtcgaaaaactggatgtgccgttttatctgcatccgcgtaacccgctgccgcaggattcccgtatctacgacggtcacccgtggctgctgggtccgacctgggcgttcgcccaagaaacggcggtgcatgccctgcgtctgatggcatctggcctgtttgatgaacacccgcgtctgaatattatcctgggtcatatgggcgaaggtctgccgtacatgatgtaccgtatcgatcatcgtatcgcatgggttaaactgccgccgcgttatccggcaaaacgtcgctttatggactacttcaacgaaaattttcacattaccacgtcaggcaacttccgtacccagacgctgattgatgcaatcctggaaattggtgctgatcgcatcctgttctcgaccgactggccgtttgaaaacattgatcatgccactgactggtttaatgctacgtctattgccgaagctgaccgtgtcaaaatcggccgcaccaatgcccgtcgtctgttcaaactggatctggac

SEQ ID NO: 746 - DNA, 984 bp, Artificial Sequence
  synthetic construct; Dicamba decarboxylase variant
atggctcaaggcaaagtggcactggaagaacatttcgcaatcccggaaacgctgcaagactcggcaggcttcgtcccgggcgactactggaaagaactgcagcatcgtctgctggatatccaagacacccgcctgaaactgatggatgcgcacggcatcgaaacgatgattctgtccctggctgcaccggctgttcaggcgattccggaccgtcgcaaagccattgaaatcgcacgtcgcgctaatgatttcctggcagaagaatgcgctaaacgtccggaccgctttctggcattcgcagcactgccgctgcaggatccggacgcagctaccgaagaactgcaacgtaccgtcaacgacctgggcttcgtgggtgccctggttaatggctttagccaggaaggcgatggtcaaaccccgctgtattacgacctgccgcagtatcgcccgttctggggtgaagtcgaaaaactggatgtgccgttttatctgcatccgcgtaacccgctgccgcaggattcccgtatctacgacggtcacccgtggctgctgggtccgacctgggcgttcgcccaagaaacggcggtgcatgccctgcgtctgatggcatctggcctgtttgatgaacacccgcgtctgaatattatcctgggtcatctgggcgaaggtctgccgtacatgatgtaccgtatcgatcatcgtatcgcatgggttcacgagccgccgcgttatccggcaaaacgtcgctttatggactacttcaacgaaaattttcacattaccacgtcaggcaacttccgtacccagacgctgattgatgcaatcctggaaattggtgctgatcgcatcctgttctcgaccgactggccgtttgaaaacattgatcatgccgctgactggtttaatgctacgtctattgccgaagctgaccgtctgaaaatcggccgcaccaatgcccgtcgtctgttcaaactggatggcgct

SEQ ID NO: 747 - DNA, 984 bp, Artificial Sequence
  synthetic construct; Dicamba decarboxylase variant
atggctcaaggcaaagtggcactggaagaacatttcgcaatcccggaaacgctgcaagactcggcaggcttcgtcccgggcgactactggaaagaactgcagcatcgtctgctggatatccaagacacccgcctgaaactgatggatgcgcacggcatcgaaacgatgattctgtccctggctgcaccggctgttcaggcgattccggaccgtcgcaaagccattgaaatcgcacgtcgcgctaatgatttcctggcagaagaatgcgctaaacgtccggaccgctttctggcattcgcagcactgccgctgcaggatccggacgcagctaccgaagaactgcaacgtaccgtcaacgatctgggcttcgtgggtgccctggttaatggctttagcgtggaaggcgatggtcaaaccccgctgtattacgacctgccgcagtatcgcccgttctggggtgaagtcgaaaaactggatgtgccgttttatctgcatccgcgtaacccgctgccgcaggattcccgtatctacgacggtcacccgtggctgctgggtccgacctgggcgttcgcccaagaaacggcggtgcatgccctgcgtctgatggcatctggcctgtttgatgaacacccgcgtctgaatattatcctgggtcatatgggcgaaggtctgccgtacatgatgtaccgtatcgatcatcgtatcgcatgggttcaagagccgccgcgttatccggcaaaacgtcgctttatggactacttcaacgaaaattttcacattaccacgtcaggcaacttccgtacccagacgctgattgatgcaatcctggaaattggtgctgatcgcatcctgttctcgaccgactggccgtttgaaaacattgatcatgccgctgactggtttaatgctacgtctattgccgaagctgaccgtgtcaaaatcggccgcaccaatgcccgtcgtctgttcaaactggatggcgat

SEQ ID NO: 748 - DNA, 984 bp, Artificial Sequence
  synthetic construct; Dicamba decarboxylase variant
atggctcaaggcaaagtggcactggaagaacatttcgcaatcccggaaacgctgcaagactcggcaggcttcgtcccgggcgactactggaaagaactgcagcatcgtctgctggatatccaagacacccgcctgaaactgatggatgcgcacggcatcgaaacgatgattctgtccctggctgcaccggctgttcaggcgattccggaccgtcgcaaagccattgaaatcgcacgtcgcgctaatgatttcctggcagaagaatgcgctaaacgtccggaccgctttctggcattcgcagcactgccgctgcaggacccggacgcagctaccgaagaactgcaacgttgcgtcaacgacctgggcttcgtgggtgccctggttaatggctttagcgtggaaggcgatggtcaaaccccgctgtattacgacctgccgcagtatcgcccgttctggggtgaagtcgaaaaactggatgtgccgttttatctgcatccgcgtaacccgctgccgcaggattcccgtatctacgacggtcacccgtggctgctgggtccgacctgggcgttcgcccaagaaacggcggtgcatgccctgcgtctgatggcatctggcctgtttgatgaacacccgcgtctgaatattatcctgggtcatctgggcgaaggtctgccgtacatgatgtaccgtatcgatcatcgtatcgcatgggttcacgagccgccgcgttatccggcaaaacgtcgctttatggactacttcaacgaaaattttcacattaccacgtcaggcaacttccgtacccagacgctgattgatgcaatcctggaaattggtgctgatcgcatcctgttctcgaccgactggccgtttgaaaacattgatcatgccgctgactggtttaatgctacgtctattgccgaagctgaccgtgtcaaaatcggccgcaccaatgcccgtcgtctgttcaaactggatggcgct

SEQ ID NO: 749 - DNA, 984 bp, Artificial Sequence
  synthetic construct; Dicamba decarboxylase variant
atggctcaaggcaaagtggcactggaagaacatttcgcaatcccggaaacgctgcaagactcggcaggctacgtcccgggcgactactggaaagaactgcagcatcgtctgctggatatccaagacacccgcctgaaactgatggatgcgcacggcatcgaaacgatgattctgtccctggctgcaccggctgttcaggcgattccggaccgtcgcaaagccattgaaatcgcacgtcgcgctaatgatttcctggcagaagaatgcgctaaacgtccggaccgctttctggcattcgcagcactgccgctgcaggatccggacgcagctagcgaagaactgcaacgttgtgtcaacgatctgggcttcgtgggtgccctggttaatggctttagccaggaaggcgatggtcaaaccccgctgtattacgacctgccgcagtatcgcccgttctggggtgaagtcgaaaaactggatgtgccgttttatctgcatccgcgtaacccgctgccgcaggattcccgtatctacgacggtcacccgtggctgctgggtccgacctgggcgttcgcccaagaaacggcggtgcatgccctgcgtctgatggcatctggcctgtttgatgaacacccgcgtctgaatattatcctgggtcatatgggcgaaggtctgccgtacatgatgtaccgtatcgatcatcgtatcgcatgggttaaactgccgccgcgttatccggcaaaacgtcgctttatggactacttcaacgaaaattttcacattaccacgtcaggcaacttccgtacccagacgctgattgatgcaatcctggaaattggtgctgatcgcatcctgttctcgaccgactggccgtttgaaaacattgatcatgccgctgactggtttaatgctacgtctattgccgaagctgaccgtgtcaaaatcggccgcaccaatgcccgtcgtctgttcaaactggatggcgct

SEQ ID NO: 750 - DNA, 984 bp, Artificial Sequence
  synthetic construct; Dicamba decarboxylase variant
atggctcaaggcaaagtggcactggaagaacatttcgcaatcccggaaacgctgcaagactcggcaggcttcgtcccgggcgactactggaaagaactgcagcatcgtctgctggatatccaagacacccgcctgaaactgatggatgcgcacggcatcgaaacgatgattctgtccctggctgcaccggctgttcaggcgattccgggccgtcgtaaagccattgaaatcgcacgtcgcgctaatgatttcctggcagaagaatgcgctaaacgtccggaccgctttctggcattcgcagcactgccgctgcaggatccggacgcagctaccgaagaactgcaacgttgtgtcaacgatctgggcttcgtgggtgccctggttaatggctttagcgtggaaggcgatggtcaaaccccgctgtattacgacctgccgcagtatcgcccgttctggggtgaagtcgaaaaactggatgtgccgttttatctgcatccgcgtaacccgctgccgcaggattcccgtatctacgacggtcacccgtggctgctgggtccgacctgggcgttcgcccaagaaacggcggtgcatgccctgcgtctgatggcatctggcctgtttgatgaacacccgcgtctgaatattatcctgggtcatctgggcgaaggtctgccgtacatgatgtaccgtatcgatcatcgtatcgcatgggttcacgagccgccgcgttatccggcaaaacgtcgctttatggactacttcaacgaaaattttcacattaccacgtcaggcaacttccgtacccagacgctgattgatgcaatcctggaaattggtgctgatcgcatcctgttctcgaccgactggccgtttgaaaacattgatcatgccgctgactggtttaatgctacgtctattgccgaagctgaccgtgtcaaaatcggccgcaccaatgcccgtcgtctgttcaaactggatctggac

SEQ ID NO: 751 - DNA, 984 bp, Artificial Sequence
  synthetic construct; Dicamba decarboxylase variant
atggctcaaggcaaagtggcactggaagaacatttcgcaatcccggaaacgctgcaagactcggcaggcttcgtcccgggcgactactggaaagaactgcagcatcgtctgctggatatccaagacacccgcctgaaactgatggatgcgcacggcatcgaaacgatgattctgtccctggctgcaccggctgttcaggcgattccggaccgtcgcaaagccattgaaatcgcacgtcgcgctaatgatttcctggcagaagaatgcgctaaacgtccggaccgctttctggcattcgcagcactgccgctgcaggatccagacgcagctagcgaagaactgcaacgttgtgtcaacgatctgggcttcgtgggtgccctggttaatggctttagccaggaaggcgatggtcaaaccccgctgtattacgacctgccgcagtatcgcccgttctggggtgaagtcgaaaaactggatgtgccgttttatctgcatccgcgtaacccgctgccgcaggattcccgtatctacgacggtcacccgtggctgctgggtccgacctgggcgttcgcccaagaaacggcggtgcatgccctgcgtctgatggcatctggcctgtttgatgaacacccgcgtctgaatattatcctgggtcatatgggcgaaggtctgccgtacatgatgtaccgtatcgatcatcgtatcgcatgggttcacgagccgccgcgttatccggcaaaacgtcgctttatggactacttcaacgaaaattttcacattaccacgtcaggcaacttccgtacccagacgctgattgatgcaatcctggaaattggtgctgatcgcatcctgttctcgaccgactggccgtttgaaaacattgatcatgccgctgactggtttaatgctacgtctattgccgaagctgaccgtctgaaaatcggccgcaccaatgcccgtcgtctgttcaaactggatggcgct

SEQ ID NO: 752 - DNA, 984 bp, Artificial Sequence
  synthetic construct; Dicamba decarboxylase variant
atggctcaaggcaaagtggcactggaagaacatttcgcaatcccggaaacgctgcaagactcggcaggcttcgtcccgggcgactactggaaagaactgcagcatcgtctgctggatatccaagacacccgcctgcgcctgatggatgcgcacggcatcgagacgatgattctgtccctggctgcaccggctgttcaggcgattccggaccgtcgtaaagccattgaaatcgcacgtcgcgctaatgatttcctggcagaagaatgcgctaaacgtccggaccgctttctggcattcgcagcactgccgctgcaggatccggacgcagctaccgaagaactgcaacgttgcgtcaacgacctgggcttcgtgggtgccctggttaatggctttagccaggaaggcgatggtcaaaccccgctgtattacgacctgccgcagtatcgcccgttctggggtgaagtcgaaaagctggatgtgccgttttatctgcatccgcgtaacccgctgccgcaggattcccgtatctacgacggtcacccgtggctgctgggtccgacctgggcgttcgcccaagaaacggcggtgcatgccctgcgtctgatggcatctggcctgtttgatgaacacccgcgtctgaatattatcctgggtcatatgggcgaaggtctgccgtacatgatgtaccgtatcgatcatcgtatcgcatgggttcacgagccgccgcgttatccggcaaaacgtcgctttatggactacttcaacgaaaattttcacattaccacgtcaggcaacttccgtacccagacgctgattgatgcaatcctggaaattggtgctgatcgcatcctgttctcgaccgactggccgtttgaaaacattgatcatgccgctgactggtttaatgctacgtctattgccgaagctgaccgtgtcaaaatcggccgcaccaatgcccgtcgtctgttcaaactggatggtgac

SEQ ID NO: 753 - DNA, 984 bp, Artificial Sequence
  synthetic construct; Dicamba decarboxylase variant
atggctcaaggcaaagtggcactggaagaacatttcgcaatcccggaaacgctgcaagactcggcaggcttcgtcccgtctgattacctgaaagaactgcagcatcgtctgctggatatccaagacacccgcctgaaactgatggatgcgcacggcatcgaaacgatgattctgtccctggctgcaccggctgttcaggcgattccggaccgtcgcaaagccattgaaatcgcacgtcgcgctaatgatttcctggcagaagaatgcgctaaacgtccggaccgctttctggcattcgcagcactgccgctgcaggatccggacgcagctaccgaagaactgcaacgttgtgtcaacgatctgggcttcgtgggtgccctggttaatggctttagccaggaaggcgatggtcaaaccccgctgtattacgacctgccgcagtatcgcccgttctggggtgaagtcgaaaaactggatgtgccgttttatctgcatccgcgtaacccgctgccgcaggattcccgtatctacgacggtcacccgtggctgctgggtccgacctgggcgttcgcccaagaaacggcggtgcatgccctgcgtctgatggcatctggcctgtttgatgaacacccgcgtctgaatattatcctgggtcatctgggcgaaggtctgccgtacatgatgtaccgtatcgatcatcgtatcgcatgggttcacgagccgccgcgttatccggcaaaacgtcgctttatggactacttcaacgaaaattttcacattaccacgtcaggcaacttccgtacccagacgctgattgatgcaatcctggaaattggtgctgatcgcatcctgttctcgaccgactggccgtttgaaaacattgatcatgccgctgactggtttaatgccacgtctattgccgaagctgaccgtgtcaaaatcggccgcaccaatgcccgtcgtctgttcaaactggatctggac

SEQ ID NO: 754 - DNA, 984 bp, Artificial Sequence
  synthetic construct; Dicamba decarboxylase variant
atggctcaaggcaaagtggcactggaagaacatttcgcaatcccggaaacgctgcaagactcggcaggcttcgtcccgtctgattacctgaaagaactgcagcatcgtctgctggacatccaagacacccgcctgaaactgatggatgcgcacggcatcgaaacgatgattctgtccctggctgcaccggctgttcaggcgattccggaccgtcgcaaagccattgaaatcgcacgtcgcgctaatgatttcctggcagaagaatgcgctaaacgtccggaccgctttctggcattcgcagcactgccgctgcaggatccggacgcagctaccgaagaactgcaacgtaccgtcaacgacctgggcttcgtgggtgccctggttaatggctttagcgtggaaggcgatggtcaaaccccgctgtattacgacctgccgcagtatcgcccgttctggggtgaagtcgaaaaactggatgtgccgttttatctgcatccgcgtaacccgctgccgcaggattcccgtatctacgacggtcacccgtggctgctgggtccgacctgggcgttcgcccaagaaacggcggtgcatgccctgcgtctgatggcatctggcctgtttgatgaacacccgcgtctgaatattatcctgggtcatatgggcgaaggtctgccgtacatgatgtaccgtatcgatcatcgtatcgcatgggttcacgagccgccgcgttatccggcaaaacgtcgctttatggactacttcaacgaaaattttcacattaccacgtcaggcaacttccgtacccagacgctgattgatgcaatcctggaaattggtgctgatcgcatcctgttctcgaccgactggccgtttgaaaacattgatcatgccgctgactggtttaatgctacgtctattgccgaagctgaccgtgtcaaaatcggccgcaccaatgcccgtcgtctgttcaaactggatggtgac

SEQ ID NO: 755 - DNA, 984 bp, Artificial Sequence
  synthetic construct; Dicamba decarboxylase variant
atggctcaaggcaaagtggcactggaagaacatttcgcaatcccggaaacgctgcaagactcggcaggcttcgtcccgggcgactactggaaagaactgcagcatcgtctgctggatatccaagacacccgcctgaaactgatggatgcgcacggcatcgaaacgatgattctgtccctggctgcaccggctgttcaggcgattccggaccgtgtaaaagccattgaaatcgcacgtcgcgctaatgatttcctggcagaagaatgcgctaaacgtccggaccgctttctggcattcgcagcactgccgctgcaggatccggacgcagctaccgaagaactgcaacgttgcgtcaacgatctgggcttcgtgggtgccctggttaatggctttagcgtggaaggcgatggtcaaaccccgctgtattacgacctgccgcagtatcgcccgttctggggtgaagtcgaaaaactggatgtgccgttttatctgcatccgcgtaacccgctgccgcaggattcccgtatctacgacggtcacccgtggctgctgggtccgacctgggcgttcgcccaagaaacggcggtgcatgccctgcgtctgatggcatctggcctgtttgatgaacacccgcgtctgaatattatcctgggtcatctgggcgaaggtctgccgtacatgatgtaccgtatcgatcatcgtatcgcatgggttcacgagccgccgcgttatccggcaaaacgtcgctttatggactacttcaacgaaaattttcacattaccacgtcaggcaacttccgtacccagacgctgattgatgcaatcctggaaattggtgctgatcgcatcctgttctcgaccgactggccgtttgaaaacattgatcatgccgctgactggtttaatgctacgtctattgccgaagctgaccgtctgaaaatcggccgcaccaatgcccgtcgtctgttcaaactggatggtgac

SEQ ID NO: 756 - DNA, 984 bp, Artificial Sequence
  synthetic construct; Dicamba decarboxylase variant
atggctcaaggcaaagtggcactggaagaacatttcgcaatcccggaaacgctgcaagactcggcaggcttcgtcccgggcgactactggaaagaactgcagcatcgtctgctggatatccaagacacccgcctgaaactgatggatgcgcacggcatcgaaacgatgattctgtccctggctgcaccggctgttcaggcgattccggaccgtcgcaaagccattgaaatcgcacgtcgcgctaatgatttcctggcagaagaatgcgctaaacgtccggaccgctttctggcattcgcagcactgccgctgcaggatccggacgcagctaccgaagaactgcaacgttgtgtcaacactctgggcttcgtgggtgccctggttaatggctttagcgtggaaggcgatggtcaaaccccgctgtattacgacctgccgcagtatcgcccgttctggggtgaagtcgaaaaactggatgtgccgttttatctgcatccgcgtaacccgctgccgcaggattcccgtatctacgacggtcacccgtggctgctgggtccgacctgggcgttcgcccaagaaacggcggtgcatgccctgcgtctgatggcatctggcctgtttgatgaacacccgcgtctgaatattatcctgggtcatatgggcgagggtctgccgtacatgatgtaccgtatcgatcatcgtatcgcatgggttcacgagccgccgcgttatccggcaaaacgtcgctttgtggactacttcaacgaaaattttcacattaccacgtcaggcaacttccgtacccagacgctgattgatgcaatcctggaaattggtgctgatcgcatcctgttctcgaccgactggccgtttgaaaacattgatcatgccgctgactggtttaatgctacgtctattgccgaagctgaccgtgtcaaaatcggccgcaccaatgcccgtcgtctgttcaaactggatggcgct

SEQ ID NO: 757 - DNA, 984 bp, Artificial Sequence
  synthetic construct; Dicamba decarboxylase variant
atggctcaaggcaaagtggcactggaagaacatttcgcaatcccggaaacgctgaacgactcggcaggcttcgtcccgggcgactactggaaagaactgcagcatcgtctgctggatatccaagacacccgcctgaaactgatggatgcgcacggcatcgaaacgatgattctgtccctggctgcaccggctgttcaggcgattccggaccgtcgcaaagccattgaaatcgcacgtcgcgctaatgatttcctggcagaagaatgcgctaaacgtccggaccgctttctggcattcgcagcactgccgctgcaggatccggacgcagctaccgaagaactgcaacgttgtgtcaacgatctgggcttcgtgggtgccctggttaatggctttagccaggaaggcgatggtcaaaccccgctgtattacgacctgccgcagtatcgcccgttctggggtgaagtcgaaaaactggatgtgccgttttatctgcatccgcgtaacccgctgccgcaggattcccgtatctacgacggtcacccgtggctgctgggtccgacctgggcgttcgcccaagaaacggcggtgcatgccctgcgtctgatggcatctggcctgtttgatgaacacccgcgtctgaatattatcctgggtcatctgggcgaaggtctgccgtacatgatgtaccgtatcgatcatcgtatcgcatgggttcacgagccgccgcgttatccggcaaaacgtcgctttatggactacttcaacgaaaattttcacattaccacgtcaggcaacttccgtacccagacgctgattgatgcaatcctggaaattggtgctgatcgcatcctgttctcgaccgactggccgtttgaaaacattgatcatgccgctgactggtttaatgctacgtctattgccgaagctgaccgtgtcaaaatcggccgcaccaatgcccgtcgtctgttcaaactggatctggac

SEQ ID NO: 758 - DNA, 984 bp, Artificial Sequence
  synthetic construct; Dicamba decarboxylase variant
atggctcaaggcaaagtggcactggaagaacatttcgcaatcccggaaacgctgcaagactcggcaggcttcgtcccgggcgactactggaaagaactgcagcatcgtctgctggatatccaagacacccgcctgaaactgatggatgcgcacggcatcgagacgatgattctgtccctggctgcaccggctgttcaggcgattccggaccgtcgcaaagccattgaaatcgcacgtcgcgctaatgatttcctggcagaagaatgcgctaaacgtccggaccgctttctggcattcgcagcactgccgctgcaggatccggacgcagctaccgaagaactgcaacgttgtgtcaacgatctgggcttcgtgggtgccctggttaatggctttagcgtggaaggcgatggtcaaaccccgctgtattacgacctgccgcagtatcgcccgttctggggtgaagtcgaaaaactggatgtgccgttttatctgcatccgcgtaacccgctgccgcaggattcccgtatctacgacggtcacccgtggctgctgggtccgacctgggcgttcgcccaagaaacggcggtgcatgccctgcgtctgatggcatctggcctgtttgatgaacacccgcgtctgaatattatcctgggtcatctgggcgaaggtctgccgtacatgatgtaccgtatcgatcatcgtatcgcatgggttcacgagccgccgcgttatccggcaaaacgtcgctttatggactacttcaacgaaaattttcacattaccacgtcaggcaacttccgtacccagacgctgattgatgcaatcctggaaattggtgctgatcgcatcctgttctcgaccgactggccgtttgaaaacattgatcatgccgctgactggtttaatgctacgtctattgccgaagctgaccgtgtcaaaatcggccgcaccaatgcccgtcgtctgttcaaactggatggtgac

SEQ ID NO: 759 - DNA, 984 bp, Artificial Sequence
  synthetic construct; Dicamba decarboxylase variant
atggctcaaggcaaagtggcactggaagaacatttcgcaatcccggaaacgctgcaagactcggcaggcttcgtcccgggcgactactggaaagaactgcagcatcgtctgctggatatccaagacacccgcctgcgcctgatggatgcgcacggcatcgaaacgatgattctgtccctggctgcaccggctgttcaggcgattccggaccgtcgcaaagccattgaaatcgcacgtcgcgctaatgatttcctggcagaagaatgcgctaaacgtccggaccgctttctggcattcgcagcactgccgctgcaggatccagacgcagctaccgaagaactgcaacgttgcgtcaacgacctgggcttcgtgggtgccctggttaatggctttagccaggaaggcgatggtcaaaccccgctgtattacgacctgccgcagtatcgcccgttctggggtgaagtcgaaaaactggatgtgccgttttatctgcatccgcgtaacccgctgccgcaggattcccgtatctacgacggtcacccgtggctgctgggtccgacctgggcgttcgcccaagaaacggcggtgcatgccctgcgtctgatggcatctggcctgtttgatgaacacccgcgtctgaatattatcctgggtcatatgggcgaaggtctgccgtacatgatgtaccgtatcgatcatcgtatcgcatgggttaaactgccgccgcgttatccggcaaaacgtcgctttatggactacttcaacgaaaattttcacattaccacgtcaggcaacttccgtacccagacgctgattgatgcaatcctggaaattggtgctgatcgcatcctgttctcgaccgactggccgtttgaaaacattgatcatgccgctgactggtttaatgctacgtctattgccgaagctgaccgtgtcaaaatcggccgcaccaatgcccgtcgtctgttcaaactggatggcgct

SEQ ID NO: 760 - DNA, 984 bp, Artificial Sequence
  synthetic construct; Dicamba decarboxylase variant
atggctcaaggcaaagtggcactggaagaacatttcgcaatcccggaaacgctgcaagactcggcaggcttcgtcccgtctgaatacctgaaagaactgcagcatcgtctgctggatatccaagacacccgcctgaaactgatggatgcgcacggcatcgaaacgatgattctgtccctggctgcaccggctgttcaggcgattccggaccgtgtaaaagccattgaaatcgcacgtcgcgctaatgatatgctggcagaagaatgcgctaaacgtccggaccgctttctggcattcgcagcactgccgctgcaggatccggacgcagctaccgaagaactgcaacgttgtgtcaacgatctgggcttcgtgggtgccctggttaatggctttagccaggaaggcgatggtcaaaccccgctgtattacgacctgccgcagtatcgcccgttctggggtgaagtcgaaaaactggatgtgccgttttatctgcatccgcgtaacccgctgccgcaggattcccgtatctacgacggtcacccgtggctgctgggtccgacctgggcgttcgcccaagaaacggcggtgcatgccctgcgtctgatggcatctggcctgtttgatgaacacccgcgtctgaatattatcctgggtcatatgggcgaaggtctgccgtacatgatgtaccgtatcgatcatcgtatcgcatgggttcacgagccgccgcgttatccggcaaaacgtcgctttatggactacttcaacgaaaattttcacattaccacgtcaggcaacttccgtacccagacgctgattgatgcaatcctggaaattggtgctgatcgcatcctgttctcgaccgactggccgtttgaaaacattgatcatgccgctgactggtttaatgctacgtctattgccgaagctgaccgtgtcaaaatcggccgcaccaatgcccgtcgtctgttcaaactggatggcgct

SEQ ID NO: 761 - DNA, 984 bp, Artificial Sequence
  synthetic construct; Dicamba decarboxylase variant
atggctcaaggcaaagtggcactggaagaacatttcgcaatcccggaaacgctgcaggactcggcaggcttcgtcccgggcgactactggaaagaactgcagcatcgtctgctggatatccaagacacccgcctgaaactgatggatgcgcacggcatcgaaacgatgattctgtccctggctgcaccggctgttcaggcgattccggaccgtcgcaaagccattgaaatcgcacgtcgcgctaatgatttcctggcagaagaatgcgctaaacgtccggaccgctttctggcattcgcagcactgccgctgcaggatgtggacgcagctagcgaagaactgcaacgttgtgtcaacgatctgggcttcgtgggtgccctggttaatggctttagccaggaaggcgatggtcaaaccccgctgtattacgacctgccgcagtatcgcccgttctggggtgaagtcgaaaaactggatgtgccgttttatctgcatccgcgtaacccgctgccgcaggattcccgtatctacgacggtcacccgtggctgctgggtccgacctgggcgttcgcccaagaaacggcggtgcatgccctgcgtctgatggcatctggcctgtttgatgaacacccgcgtctgaatattatcctgggtcatatgggcgaaggtctgccgtacatgatgtaccgtatcgatcatcgtatcgcatgggttcacgagccgccgcgttatccggcaaaacgtcgctttatggactacttcaacgaaaattttcacattaccacgtcaggcaacttccgtacccagacgctgattgatgcaatcctggaaattggtgctgatcgcatcctgttctcgaccgactggccgtttgaaaacattgatcatgccactgactggtttaatgctacgtctattgccgaagctgaccgtgtcaaaatcggccgcaccaatgcccgtcgtctgttcaaactggatctggac

SEQ ID NO: 762 - DNA, 984 bp, Artificial Sequence
  synthetic construct; Dicamba decarboxylase variant
atggctcaaggcaaagtggcactggaagaacatttcgcaatcccggaaacgctgcaagactcggcaggcttcgtcccgggcgactactggaaagaactgcagcatcgtctgctggatatccaagacacccgcctgaaactgatggatgcgcacggcatcgaaacgatgattctgtccctggctgcaccggctgttcaggcgattctggaccgtcgcaaagccattgaaatcgcacgtcgcgctaatgatatgctggcagaagaatgcgctaaacgtccggaccgctttctggcattcgcagcactgccgctgcaggatccggacgcagctaccgaagaactgcaacgttgtgtcaacgatctgggcttcgtgggtgccctggttaatggctttagccaggaaggcgatggtcaaaccccgctgtattacgacctgccgcagtatcgcccgttctggggtgaagtcgaaaaactggatgtgccgttttatctgcatccgcgtaacccgctgccgcaggattcccgtatctacgacggtcacccgtggctgctgggtccgacctgggcgttcgcccaagaaacggcggtgcatgccctgcgtctgatggcatctggcctgtttgatgaacacccgcgtctgaatattatcctgggtcatctgggcgaaggtctgccgtacatgatgtaccgtatcgatcatcgtatcgcatgggttcacgagccgccgcgttatccggcaaaacgtcgctttatggactacttcaacgaaaattttcacattaccacgtcaggcaacttccgtacccagacgctgattgatgcaatcctggaaattggtgctgatcgcatcctgttctcgaccgactggccgtttgaaaacattgatcatgccactgactggtttaatgctacgtctattgccgaagctgaccgtctgaaaatcggccgcaccaatgcccgtcgtctgttcaaactggatctggac

SEQ ID NO: 763 - DNA, 984 bp, Artificial Sequence
  synthetic construct; Dicamba decarboxylase variant
atggctcaaggcaaagtggcactggaagaacatttcgcaatcccggaaacgctgcaagactcggcaggcttcgtcccgggcgactactggaaagaactgcagcatcgtctgctggatatccaagacacccgcctgcgcctgatggatgcgcacggcatcggaacgatgattctgtccctggctgcaccggctgttcaggcgattccggaccgtcgcaaagccattgaaatcgcacgtcgcgctaatgatttcctggcagaagaatgcgctaaacgtccggaccgctttctggcattcgcagcactgccgatgcaggatccggacgcagctaccgaagaactgcaacgtaccgtcaacgatctgggcttcgtgggtgccctggttaatggctttagccaggaaggcgatggtcaaaccccgctgtattacgacctgccgcagtatcgcccgttctggggtgaagtcgaaaaactggatgtgccgttttatctgcatccgcgtaacccgctgccgcaggattcccgtatctacgacggtcacccgtggctgctgggtccgacctgggcgttcgcccaagaaacggcggtgcatgccctgcgtctgatggcatctggcctgtttgatgaacacccgcgtctgaatattatcctgggtcatatgggcgaaggtctgccgtacatgatgtaccgtatcgatcatcgtatcgcatgggttcacgagccgccgcgttatccggcaaaacgtcgctttatggactacttcaacgaaaattttcacattaccacgtcaggcaacttccgtacccagacgctgattgatgcaatcctggaaattggtgctgatcgcatcctgttctcgaccgactggccgtttgaaaacattgatcatgccgctgactggtttaatgctacgtctattgccgaagctgaccgtgtcaaaatcggccgcaccaatgcccgtcgtctgttcaaactggatggtgac

SEQ ID NO: 764 - DNA, 984 bp, Artificial Sequence
  synthetic construct; Dicamba decarboxylase variant
atggctcaaggcaaagtggcactggaagaacatttcgcaatcccggaaacgctgcaagactcggcaggcttcgtcccgggcgactactggaaagaactgcagcatcgtctgctggatatccaagacacccgcctgcgcctgatggatgcgcacggcatcgaaacgatgattctgtccctggctgcaccggctgttcaggcgattccggaccgtcgcaaagccattgaaatcgcacgtcgcgctaatgatttcctggcagaagaatgcgctaaacgtccggaccgctttctggcattcgcagcactgccgctgcaggatccggacgcagctaccgaagaactgcaacgttgcgtcaacactctgggcttcgtgggtgccctggttaatggctttagcgtggaaggcgatggtcaaaccccgctgtattacgacctgccgcagtatcgcccgttctggggtgaagtcgaaaaactggatgtgccgttttatctgcatccgcgtaacccgctgccgcaggattcccgtatctacgacggtcacccgtggctgctgggtccgacctgggcgttcgcccaagaaacggcggtgcatgccctgcgtctgatggcatctggcctgtttgatgaacacccgcgtctgaatattatcctgggtcatatgggcgaaggtctgccgtacatgatgtaccgtatcgatcatcgtatcgcatgggttcacgagccgccgcgttatccggcaaaacgtcgctttatggactacttcaacgaaaattttcacattaccacgtcaggcaacttccgtacccagacgctgattgatgcaatcctggaaattggtgctgatcgcatcctgttctcgaccgactggccgtttgaaaacattgatcatgccgctgactggtttaatgctacgtctattgccgaagctgaccgtctgaaaatcggccgcaccaatgcccgtcgtctgttcaaactggatggtgac

SEQ ID NO: 765 - DNA, 984 bp, Artificial Sequence
  synthetic construct; Dicamba decarboxylase variant
atggctcaaggcaaagtggcactggaagaacatttcgcaatcccggaaacgctgcaagactcggcaggcttcgtcccgggcgactactggaaagaactgcagcatcgtctgctggatatccaagacacccgcctgaaactgatggatgcgcacggcatcgagacgatgattctgtccctggctgcaccggctgttcaggcgattccggaccgtcgcaaagccattgaaatcgcacgtcgcgctaatgatttcctggcagaagaatgcgctaaacgtccggaccgctttctggcattcgcagcactgccgctgcaggatccggacgcagctaccgaagaactgcaacgttgtgtcaacgatctgggcttcgtgggtgccctggttaatggctttagccaggaaggcgatggtcaaaccccgctgtattacgacctgccgcagtatcgcccgttctggggtgaagtcgaaaaactggatgtgccgttttatctgcatccgcgtaacccgctgccgcaggattcccgtatctacgacggtcacccgtggctgctgggtccgacctgggcgttcgcccaagaaacggcggtgcatgccctgcgtctgatggcatctggcctgtttgatgaacacccgcgtctgaatattatcctgggtcatatgggcgaaggtctgccgtacatgatgtaccgtatcgatcatcgtatcgcatgggttcacgagccgccgcgttatccggcaagacgtcgctttatggactacttcaacgaaaattttcacattaccacgtcaggcaacttccgtacccagacgctgattgatgcaatcctggaaattggtgctgatcgcatcctgttctcgaccgactggccgtttgaaaacattgatcatgccactgactggtttaatgctacgtctattgccgaagctgaccgtctgaaaatcggccgcaccaatgcccgtcgtctgttcaaactggatggcgac

SEQ ID NO: 766 - DNA, 984 bp, Artificial Sequence
  synthetic construct; Dicamba decarboxylase variant
atggctcaaggcaaagtggcactggaagaacatttcgcaatcccggaaacgctgcaagactcggcaggcttcgtcccgggcgactactggaaagaactgcagcatcgtctgctggatatccaagacacccgcctgcgcctgatggatgcgcacggcatcgaaacgatgattctgtccctggctgcaccggctgttcaggcgattccggaccgtcgcaaagccattgaaatcgcacgtcgcgctaatgatttcctggcagaagaatgcgctaaacgtccggaccgctttctggcattcgcagcactgccgctgcaggatccggacgcagctaccgaagaactgcaacgttgtgtcaacgatctgggcttcgtgggtgccctggttaatggctttagcgtggaaggcgatggtcaaaccccgctgtattacgacctgccgcagtatcgcccgttctggggtgaagtcgaaaaactggatgtgccgttttatctgcatccgcgtaacccgctgccgcaggattcccgtatctacgacggtcacccgtggctgctgggtccgacctgggcgttcgcccaagaaacggcggtgcatgccctgcgtctgatggcatctggcctgtttgatgaacacccgcgtctgaatattatcctgggtcatatgggcgaaggtctgccgtacatgatgtaccgtatcgatcatcgtatcgcatgggttcacgagccgccgcgttatccggcaaaacgtcgctttatggactacttcaacgaaaattttcacattaccacgtcaggcaacttccgtacccagacgctgattgatgcaatcctggaaattggtgctgatcgcatcctgttctcgaccgactggccgtttgaaaacattgatcatgccgctgactggtttaatgctacgtctattgccgaagctgaccgtgtcaaaatcggccgcaccaatgcccgtcgtctgttcaaactggatggcgct

SEQ ID NO: 767 - DNA, 984 bp, Artificial Sequence
  synthetic construct; Dicamba decarboxylase variant
atggctcaaggcaaagtggcactggaagaacatttcgcaatcccggagacgctgcaggactcggcaggcttcgtcccgggcgactactggaaagaactgcagcatcgtctgctggatatccaagacacccgcctgaaactgatggatgcgcacggcatcgaaacgatgattctgtccctggctgcaccgggtgttcaggcgattccggaccgtcgcaaagccattgaaatcgcacgtcgcgctaatgatatgctggcagaagaatgcgctaaacgtccggaccgctttctggcattcgcagcactgccgctgcaggatccggacgcagctaccgaagaactgcaacgttgtgtcaacgatctgggcttcgtgggtgccctggttaatggctttagcgtggaaggcgatggtcaaaccccgctgtattacgacctgccgcagtatcgcccgttctggggtgaagtcgaaaaactggatgtgccgttttatctgcatccgcgtaacccgctgccgcaggattcccgtatctacgacggtcacccgtggctgctgggtccgacctgggcgttcgcccaagaaacggcggtgcatgccctgcgtctgatggcatctggcctgtttgatgaacacccgcgtctgaatattatcctgggtcatatgggcgaaggtctgccgtacatgatgtaccgtatcgatcatcgtatcgcatgggttcacgagccgccgcgttatccggcaaaacgtcgctttatggactacttcaacgaaaattttcacattaccacgtcaggcaacttccgtacccagacgctgattgatgcaatcctggaaattggtgctgatcgcatcctgttctcgaccgactggccgtttgaaaacattgatcatgccgctgactggtttaatgctacgtctattgccgaagctgaccgtgtcaaaatcggccgcaccaatgcccgtcgtctgttcaaactggatggtgac

SEQ ID NO: 768 - DNA, 984 bp, Artificial Sequence
  synthetic construct; Dicamba decarboxylase variant
atggctcaaggcaaagtggcactggaagaacatttcgcaatcccggagacgctgcaggactcggcaggcttcgtcccgggcgactactggaaagaactgcagcatcgtctgctggatatccaagacacccgcctgaaactgatggatgcgcacggcatcgaaacgatgattctgtccctggctgcaccggctgttcaggcgattccggaccgtggccaagccattgaaatcgcacgtcgcgctaatgatttcctggcagaagaatgcgctaaacgtccggaccgctttctggcattcgcagcactgccgctgcaggatccggacgcagctaccgaagaactgcaacgtactgtcaacgatctgggcttcgtgggtgccctggttaatggctttagccaggaaggcgatggtcaaaccccgctgtattacgacctgccgcagtatcgcccgttctggggtgaagtcgaaaaactggatgtgccgttttatctgcatccgcgtaacccgctgccgcaggattcccgtatctacgacggtcacccgtggctgctgggtccgacctgggcgttcgcccaagaaacggcggtgcatgccctgcgtctgatggcatctggcctgtttgatgaacacccgcgtctgaatattatcctgggtcatctgggcgaaggtctgccgtacatgatgtaccgtatcgatcatcgtatcgcatgggttcacgagccgccgcgttatccggcaaaacgtcgctttatggactacttcaacgaaaattttcacattaccacgtcaggcaacttccgtacccagacgctgattgatgcaatcctggaaattggtgctgatcgcatcctgttctcgaccgactggccgtttgaaaacattgatcatgccgctgactggtttaatgctacgtctattgccgaagctgaccgtgtgaaaatcggccgcaccaatgcccgtcgtctgttcaaactggatggcgct

SEQ ID NO: 769 - DNA, 984 bp, Artificial Sequence
  synthetic construct; Dicamba decarboxylase variant
atggctcaaggcaaagtggcactggaagaacatttcgcaatcccggaaacgctgcaagactcggcaggcttcgtcccgggcgactactggaaagaactgcagcatcgtctgctggatatccaagacacccgcctgaaactgatggatgcgcaccgcatcgaaacgatgattctgtccctggctgcaccggctgttcaggcgattccggaccgtcgcaaagccattgaaatcgcacgtcgcgctaatgatttcctggcagaagaatgcgctaaacgtccggaccgctttctggcattcgcagcactgccgctgcaggatccggacgcagctaccgaagaactgcaacgttgtgtcaacgatctgggcttcgtgggtgccctggttaatggctttagccaggaaggcgatggtcaaaccccgctgtattacgacctgccgcagtatcgcccgttctggggtgaagtcgaaaaactggatgtgccgttttatctgcatccgcgtaacccgctgccgcaggattcccgtatctacgacggtcacccgtggctgctgggtccgacctgggcgttcgcccaagaaacggcggtgcatgccctgcgtctgatggcatctggcctgtttgatgaacacccgcgtctgaatattatcctgggtcatatgggcgaaggtctgccgtacatgatgtaccgtatcgatcatcgtatcgcatgggttaaactgccgccgcgttatccggcaaaacgtcgctttatggactacttcaacgaaaattttcacattaccacgtcaggcaacttccgtacccagacgctgattgatgcaatcctggaaattggtgctgatcgcatcctgttctcgaccgactggccgtttgaaaacattgatcatgccgctgactggtttaatgctacgtctattgccgaagctgaccgtgtgaaaatcggccgcaccaatgcccgtcgtctgttcaaactggatggtgac

SEQ ID NO: 770 - DNA, 984 bp, Artificial Sequence
  synthetic construct; Dicamba decarboxylase variant
atggctcaaggcaaagtggcactggaagaacatttcgcaatcccggaaacgctgcaagactcggcaggcttcgtcccgggcgactactggaaagaactgcagcatcgtctgctggatatccaagacacccgcctgaaactgatggatgcgcacggcatcgaaacgatgattctgtccctggctgcaccggctgttcaggcgattccggaccgtcgcaaagccattgaaatcgcacgtcgcgctaatgatttcctggcagaagaatgcgctaaacgtccggaccgctttctggcattcgcagcactgccgctgcaggatccggacgcagctaccgaagaactgcaacgttgcgtcaacactctgggcttcgtgggtgccctggttaatggctttagcgtggaaggcgatggtcaaaccccgctgtattacgacctgccgcagtatcgcccgttctggggtgaagtcgaaaaactggatgtgccgttttatctgcatccgcgtaacccgctgccgcaggattcccgtatctacgacggtcacccgtggctgctgggtccgacctgggcgttcgcccaagaaacggcggtgcatgccctgcgtctgatggcatctggcctgtttgatgaacacccgcgtctgaatattatcctgggtcatctgggcgaaggtctgccgtacatgatgtaccgtatcgatcatcgtatcgcatgggttcacgagccgccgcgttatccggcaaaacgtcgctttatggactacttcaacgaaaattttcacattaccacgtcaggcaacttccgtacccagacgctgattgatgcaatcctggaaattggtgctgatcgcatcctgttctcgaccgactggccgtttgaaaacattgatcatgccactgactggtttaatgctacgtctattgccgaagctgaccgtgtcaaaatcggccgcaccaatgcccgtcgtctgttcaaactggatggtgac

SEQ ID NO: 771 - DNA, 984 bp, Artificial Sequence
  synthetic construct; Dicamba decarboxylase variant
atggctcaaggcaaagtggcactggaagaacatttcgcaatcccggagacgctgcaggactcggcaggcttcgtcccgggcgactactggaaagaactgcagcatcgtctgctggatatccaagacacccgcctgaaactgatggatgcgcacggcatcgagacgatgattctgtccctggctgcaccggctgttcaggcgattccggaccgtcgcaaagccattgaaatcgcacgtcgcgctaatgatttcctggcagaagaatgcgctaaacgtccggaccgctttctggcattcgcagcactgccgatgcaggatccggacgcagctaccgaagaactgcaacgttgtgtcaacgatctgggcttcgtgggtgccctggttaatggctttagccaggaaggcgatggtcaaaccccgctgtattacgacctgccgcagtatcgcccgttctggggtgaagtcgaaaaactggatgtgccgttttatctgcatccgcgtaacccgctgccgcaggattcccgtatctacgacggtcacccgtggctgctgggtccgacctgggcgttcgcccaagaaacggcggtgcatgccctgcgtctgatggcatctggcctgtttgatgaacacccgcgtctgaatattatcctgggtcatatgggcgaaggtctgccgtacatgatgtaccgtatcgatcatcgtatcgcatgggttaaactgccgccgcgttatccggcaaaacgtcgctttatggactacttcaacgaaaattttcacattaccacgtcaggcaacttccgtacccagacgctgattgatgcaatcctggaaattggtgctgatcgcatcctgttctcgaccgactggccgtttgaaaacattgatcatgccgctgactggtttaatgctacgtctattgccgaagctgaccgtgtcaaaatcggccgcaccaatgcccgtcgtctgttcaaactggatggtgac

SEQ ID NO: 772 - DNA, 984 bp, Artificial Sequence
  synthetic construct; Dicamba decarboxylase variant
atggctcaaggcaaagtggcactggaagaacatttcgcaatcccggaaacgctgcaagactcggcaggcttcgtcccgggcgactactggaaagaactgcagcatcgtctgctggatatccaagacacccgcctgaaactgatggatgcgcacggcatcgaaacgatgattctgtccctggctgcaccggctgttcaggcgattccggaccgtcgcaaagccattgaaatcgcacgtcgcgctaatgatttcctggcagaagaatgcgctaaacgtccggaccgctttctggcattcgcagcactgccgctgcaggatccggacgcagctaccgaagaactgcaacgttgtgtcaacgatctgggcttcgtgggtgccctggttaatggctttagccaggaaggcgatggtcaaaccccgctgtattacgacctgccgcagtatcgcccgttctggggtgaagtcgaaaaactggatgtgccgttttatctgcatccgcgtaacccgctgccgcaggattcccgtatctacgacggtcacccgtggctgctgggtccgacctgggcgttcgcccaagaaacggcggtgcatgccctgcgtctgatggcatctggcctgtttgatgaacacccgcgtctgaatattatcctgggtcatctgggcgaaggtctgccgtacatgatgtaccgtatcgatcatcgtatcgcatgggttaaactgccgccgcgttatccggcaaaacgtcgctttatggactacttcaacgaaaattttcacattaccacgtcaggcaacttccgtacccagacgctgattgatgcaatcctggaaattggtgctgatcgcatcctgttctcgaccgactggccgtttgaaaacattgatcatgccgctgactggtttaatgctacgtctattgccgaagctgaccgtgtcaaaatcggccgcaccaatgcccgtcgtctgttcaaactggatggcgct

SEQ ID NO: 773 - DNA, 984 bp, Artificial Sequence
  synthetic construct; Dicamba decarboxylase variant
atggctcaaggcaaagtggcactggaagaacatttcgcaatcccggaaacgctgcaagactcggcaggcttcgtcccgggcgattactggaaagaactgcagcatcgtctgctggatatccaagacacccgcctgaaactgatggatgcgcacggcatcgaaacgatgattctgtccctggctgcaccggctgttcaggcgattccggaccgtcgcaaagccattgaaatcgcacgtcgcgctaatgatatcctggcagaagaatgcgctaaacgtccggaccgctttctggcattcgcagcactgccgatgcaggatccggacgcagctaccgaagaactgcaacgttgtgtcaacgatctgggcttcgtgggtgccctggttaatggctttagccaggaaggcgatggtcaaaccccgctgtattacgacctgccgcagtatcgcccgttctggggtgaagtcgaaaaactggatgtgccgttttatctgcatccgcgtaacccgctgccgcaggattcccgtatctacgacggtcacccgtggctgctgggtccgacctgggcgttcgcccaagaaacggcggtgcatgccctgcgtctgatggcatctggcctgtttgatgaacacccgcgtctgaatattatcctgggtcatatgggcgaaggtctgccgtacatgatgtaccgtatcgatcatcgtatcgcatgggttaaactgccgccgcgttatccggcaaaacgtcgctttatggactacttcaacgaaaattttcacattaccacgtcaggcaacttccgtacccagacgctgattgatgcaatcctggaaattggtgctgatcgcatcctgttctcgaccgactggccgtttgaaaacattgatcatgccgctgactggtttaatgctacgtctattgccgaagctgaccgtgtgaaaatcggccgcaccaatgcccgtcgtctgttcaaactggatgtggac

SEQ ID NO: 774 - DNA, 984 bp, Artificial Sequence
  synthetic construct; Dicamba decarboxylase variant
atggctcaaggcaaagtggcactggaagaacatttcgcaatcccggaaacgctgcaagactcggcaggcttcgtcccgtctgaatacctgaaagaactgcagcatcgtctgctggatatccaagacacccgcctgaaactgatggatgcgcacggcatcgaaacgatgattctgtccctggctgcaccggctgttcaggcgattccggaccgtcgcaaagccattgaaatcgcacgtcgcgctaatgatttcctggcagaagaatgcgctaaacgtccggaccgctttctggcattcgcagcactgccgctgcaggatccggacgcagctaccgaagaactgcaacgtaccgtcaacgatctgggcttcgtgggtgccctggttaatggctttagccaggaaggcgatggtcaaaccccgctgtattacgacctgccgcagtatcgcccgttctggggtgaagtcgaaaaactggatgtgccgttttatctgcatccgcgtaacccgctgccgcaggattcccgtatctacgacggtcacccgtggctgctgggtccgacctgggcgttcgcccaagaaacggcggtgcatgccctgcgtctgatggcatctggcctgtttgatgaacacccgcgtctgaatattatcctgggtcatctgggcgaaggtctgccgtacatgatgtaccgtatcgatcatcgtatcgcatgggttcacgagccgccgcgttatccggcaaaacgtcgctttatggactacttcaacgaaaattttcacattaccacgtcaggcaacttccgtacccagacgctgattgatgcaatcctggaaattggtgctgatcgcatcctgttctcgaccgactggccgtttgaaaacattgatcatgccactgcctggtttaatgctacgtctattgccgaagctgaccgtgtcaaaatcggccgcaccaatgcccgccgtctgttcaaactggatggcgct

SEQ ID NO: 775 - DNA, 984 bp, Artificial Sequence
  synthetic construct; Dicamba decarboxylase variant
atggctcaaggcaaagtggcactggaagaacatttcgcaatcccggaaacgctgcaagactcggcaggcttcgtcccgggcgactactggaaagaactgcagcatcgtctgctggatatccaagacacccgcctgaaactgatggatgcgcaccaaatcgagacgatgattctgtccctggctgcaccggctgttcaggcgattccggaccgtcgcaaagccattgaaatcgcacgtcgcgctaatgatttcctggcagaagaatgcgctaaacgtccggaccgctttctggcattcgcagcactgccgctgcaggatccggacgcagctaccgaagaactgcaacgttgtgtcaacgatctgggcttcgtgggtgccctggttaatggctttagcgtggaaggcgatggtcaaaccccgctgtattacgacctgccgcagtatcgcccgttctggggtgaagtcgaaaaactggatgtgccgttttatctgcatccgcgtaacccgctgccgcaggattcccgtatctacgacggtcacccgtggctgctgggtccgacctgggcgttcgcccaagaaacggcggtgcatgccctgcgtctgatggcatctggcctgtttgatgaacacccgcgtctgaatattatcctgggtcatatgggcgaaggtctgccgtacatgatgtaccgtatcgatcatcgtatcgcatgggttcacgagccgccgcgttatccggcaaaacgtcgctttatggactacttcaacgaaaattttcacattaccacgtcaggcaacttccgtacccagacgctgattgatgcaatcctggaaattggtgctgatcgcatcctgttctcgaccgactggccgtttgaaaacattgatcatgccgctgcctggtttaatgctacgtctattgccgaagctgaccgtctgaaaatcggccgcaccaatgcccgtcgtctgttcaaactggatggtgac

SEQ ID NO: 776 - DNA, 984 bp, Artificial Sequence
  synthetic construct; Dicamba decarboxylase variant
atggctcaaggcaaagtggcactggaagaacatttcgcaatcccggaaacgctgcaagactcggcaggcttcgtcccgggcgactactggaaagaactgcagcatcgtctgctggatatccaagacacccgcctgaaactgatggatgcgcacggcatcgaaacgatgattctgtccctggctgcaccggctgttcaggcgattccggaccgtcgcaaagccattgaaatcgcacgtcgcgctaatgatttcctggcagaagaatgcgctaaacgtccggaccgctttctggcattcgcagcactgccgctgcaggatccggacgcagctaccgaagaactgcaacgttgtgtcaacgatctgggcttcgtgggtgccctggttaatggctttagcgtggaaggcgatggtcaaaccccgctgtattacgacctgccgcagtatcgcccgttctggggtgaagtcgaaaaactggatgtgccgttttatctgcatccgcgtaacccgctgccgcaggattcccgtatctacgacggtcacccgtggctgctgggtccgacctgggcgttcgcccaagaaacggcggtgcatgccctgcgtctgatggcatctggcctgtttgatgaacacccgcgtctgaatattatcctgggtcatatgggcgaaggtctgccgtacatgatgtaccgtatcgatcatcgtatcgcatgggttcacgagccgccgcgttatccggcaaaacgtcgctttatggactacttcaacgaaaattttcacattaccacgtcaggcaacttccgtacccagacgctgattgatgcaatcctggaaattggtgctgatcgcatcctgttctcgaccgactggccgtttgaaaacattgatcatgccgctgactggtttaatgctacgtctattgccgaagctgaccgtgtcaaaatcggccgcaccaatgcccgtcgtctgttcaaactggatctggac

SEQ ID NO: 777 - DNA, 984 bp, Artificial Sequence
  synthetic construct; Dicamba decarboxylase variant
atggctcaaggcaaagtggcactggaagaacatttcgcaatcccggagacgctgaacgactcggcaggcttcgtcccgggcgactactggaaagaactgcagcatcgtctgctggatatccaagacacccgcctgaaactgatggatgcgcacggcatcgagacgatgattctgtccctggctgcaccggctgttcaggcgattccggaccgtcgcaaagccattgaaatcgcacgtcgcgctaatgatatgctggcagaagaatgcgctaaacgtccggaccgctttctggcattcgcagcactgccgctgcaggatccggacgcagctagcgaagaactgcaacgttgcgtcaacgatctgggcttcgtgggtgccctggttaatggctttagccaggaaggcgatggtcaaaccccgctgtattacgacctgccgcagtatcgcccgttctggggtgaagtcgaaaaactggatgtgccgttttatctgcatccgcgtaacccgctgccgcaggattcccgtatctacgacggtcacccgtggctgctgggtccgacctgggcgttcgcccaagaaacggcggtgcatgccctgcgtctgatggcatctggcctgtttgatgaacacccgcgtctgaatattatcctgggtcatatgggcgaaggtctgccgtacatgatgtaccgtatcgatcatcgtatcgcatgggttcacgagccgccgcgttatccggcaaaacgtcgctttatggactacttcaacgaaaattttcacattaccacgtcaggcaacttccgtacccagacgctgattgatgcaatcctggaaattggtgctgatcgcatcctgttctcgaccgactggccgtttgaaaacattgatcatgccgctgactggtttaatgctacgtctattgccgaagctgaccgtgtgaaaatcggccgcaccaatgcccgtcgtctgttcaaactggatggtgac

SEQ ID NO: 778 - DNA, 984 bp, Artificial Sequence
  synthetic construct; Dicamba decarboxylase variant
atggctcaaggcaaagtggcactggaagaacatttcgcaatcccggaaacgctgcaagactcggcaggcttcgtcccgggcgactactggaaagaactgcagcatcgtctgctggatatccaagacacccgcctgaaactgatggatgcgcacggcatcgagacgatgattctgtccctggctgcaccggctgttcaggcgattccggaccgtcgtaaagccattgaaatcgcacgtcgcgctaatgatttcctggcagaagaatgcgctaaacgtccggaccgctttctggcattcgcagcactgccgctgcaggatccggacgcagctaccgaagaactgcaacgttgtgtcaacgacctgggcttcgtgggtgccctggttaatggctttagccaggaaggcgatggtcaaaccccgctgtattacgacctgccgcagtatcgcccgttctggggtgaagtcgaaaaactggatgtgccgttttatctgcatccgcgtaacccgctgccgcaggattcccgtatctacgacggtcacccgtggctgctgggtccgacctgggcgttcgcccaagaaacggcggtgcatgccctgcgtctgatggcatctggcctgtttgatgaacgcccgcgtctgaatattatcctgggtcatctgggcgaaggtctgccgtacatgatgtaccgtatcgatcatcgtatcgcatgggttcacgagccgccgcgttatccggcaaaacgtcgctttatggactacttcaacgaaaattttcacattaccacgtcaggcaacttccgtacccagacgctgattgatgcaatcctggaaattggtgctgatcgcatcctgttctcgaccgactggccgtttgaaaacattgatcatgccgctgactggtttaatgctacgtctattgccgaagctgaccgtgtcaaaatcggccgcaccaatgcccgtcgtctgttcaaactggatggtgac

SEQ ID NO: 779 - DNA, 984 bp, Artificial Sequence
  synthetic construct; Dicamba decarboxylase variant
atggctcaaggcaaagtggcactggaagaacatttcgcaatcccggaaacgctgcaagactcggcaggcttcgtcccgggcgactactggaaagaactgcagcatcgtctgctggatatccaagacacccgcctgaaactgatggatgcgcacggcatcgaaacgatgattctgtccctggctgcaccggctgttcaggcgattccggaccgtcgcaaagccattgaaatcgcacgtcgcgctaatgatttcctggcagaagaatgcgctaaacgtccggaccgctttctggcattcgcagcactgccgctgcaggatccagacgcagctaccgaagaactgcaacgttgtgtcaacgatctgggcttcgtgggtgccctggttaatggctttagcgtggaaggcgatggtcaaaccccgctgtattacgacctgccgcagtatcgcccgttctggggtgaagtcgaaaaactggatgtgccgttttatctgcatccgcgtaacccgctgccgcaggattcccgtatctacgacggtcacccgtggctgctgggtccgacctgggcgttcgcccaagaaacggcggtgcatgccctgcgtctgatggcatctggcctgtttgatgaacacccgcgtctgaatattatcctgggtcatatgggcgaaggtctgccgtacatgatgtaccgtatcgatcatcgtatcgcatgggttaaactgccgccgcgttatccggcaaaacgtcgctttatggactacttcaacgaaaattttcacattaccacgtcaggcaacttccgtacccagacgctgattgatgcaatcctggaaattggtgctgatcgcatcctgttctcgaccgactggccgtttgaaaacattgatcatgccgctgactggtttaatgctacgtctattgccgaagctgaccgtgtcaaaatcggccgcaccaatgcccgtcgtctgttcaaactggatggtgac

SEQ ID NO: 780 - DNA, 984 bp, Artificial Sequence
  synthetic construct; Dicamba decarboxylase variant
atggctcaaggcaaagtggcactggaagaacatttcgcaatcccggagacgctgaacgactcggcaggcttcgtcccgggcgactactggaaagaactgcagcatcgtctgctggatatccaagacacccgcctgaaactgatggatgcgcacggcatcgaaacgatgattctgtccctggctgcaccggctgttcaggcgattccggaccgtcgcaaagccattgaaatcgcacgtcgcgctaatgatttcctggcagaagaatgcgctaaacgtccggaccgctttctggcattcgcagcactgccgctgcaggatccggacgcagctaccgaagaactgcaacgttgtgtcaacgatctgggcttcgtgggtgccctggttaatggctttagccaggaaggcgatggtcaaaccccgctgtattacgacctgccgcagtatcgcccgttctggggtgaagtcgaaaaactggatgtgccgttttatctgcatccgcgtaacccgctgccgcaggattcccgtatctacgacggtcacccgtggctgctgggtccgacctgggcgttcgcccaagaaacggcggtgcatgccctgcgtctgatggcatctggcctgtttgatgaacacccgcgtctgaatattatcctgggtcatatgggcgaaggtctgccgtacatgatgtaccgtatcgatcatcgtatcgcatgggttaaactgccgccgcgttatccggcaaaacgtcgctttatggactacttcaacgaaaattttcacattaccacgtcaggcaacttccgtacccagacgctgattgatgcaatcctggaaattggtgctgatcgcatcctgttctcgaccgactggccgtttgaaaacattgatcatgccactgcctggtttaatgctacgtctattgccgaagctgaccgtctgaaaatcggccgcaccaatgcccgtcgtctgttcaaactggatctggac

SEQ ID NO: 781 - DNA, 984 bp, Artificial Sequence
  synthetic construct; Dicamba decarboxylase variant
atggctcaaggcaaagtggcactggaagaacatttcgcaatcccggagacgctgaacgactcggcaggcttcgtcccgggcgactactggaaagaactgcagcatcgtctgctggatatccaagacacccgcctgaaactgatggatgcgcacggcatcgaaacgatgattctgtccctggctgcaccggctgttcaggcgattccggaccgtcgcaaagccattgaaatcgcacgtcgcgctaatgatttcctggcagaagaatgcgctaaacgtccggaccgctttctggcattcgcagcactgccgctgcaggatccggacgcagctaccgaagaactgcaacgttgcgtcaacactctgggcttcgtgggtgccctggttaatggctttagccaggaaggcgatggtcaaaccccgctgtattacgacctgccgcagtatcgcccgttctggggtgaagtcgaaaaactggatgtgccgttttatctgcatccgcgtaacccgctgccgcaggattcccgtatctacgacggtcacccgtggctgctgggtccgacctgggcgttcgcccaagaaacggcggtgcatgccctgcgtctgatggcatctggcctgtttgatgaacacccgcgtctgaatattatcctgggtcatatgggcgaaggtctgccgtacatgatgtaccgtatcgatcatcgtatcgcatgggttcacgagccgccgcgttatccggcaaaacgtcgctttatggactacttcaacgaaaattttcacattaccacgtcaggcaacttccgtacccagacgctgattgatgcaatcctggaaattggtgctgatcgcatcctgttctcgaccgactggccgtttgaaaacattgatcatgccgctgactggtttaatgctacgtctattgccgaagctgaccgtctgaaaatcggccgcaccaatgcccgtcgtctgttcaaactggatctggac

SEQ ID NO: 782 - DNA, 984 bp, Artificial Sequence
  synthetic construct; Dicamba decarboxylase variant
atggctcaaggcaaagtggcactggaagaacatttcgcaatcccggagacgctgcacgactcggcaggcttcgtcccgggcgactactggaaagaactgcagcatcgtctgctggatatccaagacacccgcctgaaactgatggatgcgcacggcatcgaaacgatgattctgtccctggctgcaccggctgttcaggcgattccggaccgtcgcaaagccattgaaatcgcacgtcgcgctaatgatttcctggcagaagaatgcgctaaacgtccggaccgctttctggcattcgcagcactgccgctgcaggatccggacgcagctagcgaagaactgcaacgttgtgtcaacgatctgggcttcgtgggtgccctggttaatggctttagccgggaaggcgatggtcaaaccccgctgtattacgacctgccgcagtatcgcccgttctggggtgaagtcgaaaaactggatgtgccgttttatctgcatccgcgtaacccgctgccgcaggattcccgtatctacgacggtcacccgtggctgctgggtccgacctgggcgttcgcccaagaaacggcggtgcatgccctgcgtctgatggcatctggcctgtttgatgaacacccgcgtctgaatattatcctgggtcatatgggcgaaggtctgccgtacatgatgtaccgtatcgatcatcgtatcgcatgggttaaactgccgccgcgttatccggcaaaacgtcgctttatggactacttcaaggaaaattttcacattaccacgtcaggcaacttccgtacccagacgctgattgatgcaatcctggaaattggtgctgatcgcatcctgttctcgaccgactggccgtttgaaaacattgatcatgccgctgactggtttaatgctacgtctattgccgaagctgaccgtgtcaaaatcggccgcaccaatgcccgtcgtctgttcaaactggatggggac

SEQ ID NO: 783 - DNA, 984 bp, Artificial Sequence
  synthetic construct; Dicamba decarboxylase variant
atggctcaaggcaaagtggcactggaagaacatttcgcaatcccggaaacgctgcaagactcggcaggcttcgtcccgggcgactactggaaagaactgcagcatcgtctgctggatatccaagacacccgcctgaaactgatggatgcgcacggcatcgaaacgatgattctgtccctggctgcagttggtgttcaggcgattccggaccgtcgcaaagccattgaaatcgcacgtcgcgctaatgatttcctggcagaagaatgcgctaaacgtccggaccgctttctggcattcgcagcactgccgctgcaggatccggacgcagctaccgaagaactgcaacgttgtgtcaacgatctgggcttcgtgggtgccctggttaatggctttagccaggaaggcgatggtcaaaccccgctgtattacgacctgccgcagtatcgcccgttctggggtgaagtcgaaaaactggatgtgccgttttatctgcatccgcgtaacccgctgccgcaggattcccgtatctacgacggtcacccgtggctgctgggtccgacctgggcgttcgcccaagaaacggcggtgcatgccctgcgtctgatggcatctggcctgtttgatgaacacccgcgtctgaatattatcctgggtcatatgggcgaaggtctgccgtacatgatgtaccgtatcgatcatcgtatcgcatgggttcacgagccgccgcgttatccggcaaaacgtcgctttatggactacttcaacgaaaattttcacattaccacgtcaggcaacttccgtacccagacgctgattgatgcaatcctggaaattggtgctgatcgcatcctgttctcgaccgactggccgtttgaaaacattgatcatgccactgactggtttaatgctacgtctattgccgaagctgaccgtgtcaaaatcggccgcaccaatgcccgtcgtctgttcaaactggatggtgac

SEQ ID NO: 784 - DNA, 984 bp, Artificial Sequence
  synthetic construct; Dicamba decarboxylase variant
atggctcaaggcaaagtggcactggaagaacatttcgcaatcccggaaacgctgcaagactcggcaggcttcgtcccgggcgactactggaaagaactgcagcatcgtctgctggatatccaagacacccgcctgcgcctgatggatgcgcacggcatcgaaacgatgattctgtccctggctgcaccggctgttcaggcgattccggaccgtcgcaaagccattgaaatcgcacgtcgcgctaatgatatgctggcagaagaatgcgctaaacgtccggaccgctttctggcattcgcagcactgccgctgcaggatccggacgcagctaccgaagaactgcaacgttgtgtcaacgatctgggcttcgtgggtgccctggttaatggctttagccaggaaggcgatggtcaaaccccgctgtattacgacctgccgcagtatcgcccgttctggggtgaagtcgaaaaactggatgtgccgttttatctgcatccgcgtaacccgctgccgcaggattcccgtatctacgacggtcacccgtggctgctgggtccgacctgggcgttcgcccaagaaacggcggtgcatgccctgcgtctgatggcatctggcctgtttgatgaacacccgcgtctgaatattatcctgggtcatatgggcgaaggtctgccgtacatgatgtaccgtatcgatcatcgtatcgcatgggttcacgagccgccgcgttatccggcaaaacgtcgctttatggactacttcaacgaaaattttcacattaccacgtcaggcaacttccgtacccagacgctgattgatgcaatcctggaaattggtgctgatcgcatcctgttctcgaccgactggccgtttgaaaacattgatcatgccgctgactggtttaatgctacgtctattgccgaagctgaccgtgtcaaaatcggccgcaccaatgcccgtcgtctgttcaaactggatggtgac

SEQ ID NO: 785 - DNA, 984 bp, Artificial Sequence
  synthetic construct; Dicamba decarboxylase variant
atggctcaaggcaaagtggcactggaagaacatttcgcaatcccggagacgctgaacgactcggcaggcttcgtcccgggcgactactggaaagaactgcagcatcgtctgctggatatccaagacacccgcctgcgcctgatggatgcgcacggcatcgagacgatgattctgtccctggctgcaccggctgttcaggcgattccggaccgtcgcaaagccattgaaatcgcacgtcgcgctaatgatttcctggcagaagaatgcgctaaacgtccggaccgctttctggcattcgcagcactgccgctgcaggatccggacgcagctaccgaagaactgcaacgttgcgtcaacgacctgggcttcgtgggtgccctggttaatggctttagccaggaaggcgatggtcaaaccccgctgtattacgacctgccgcagtatcgcccgttctggggtgaagtcgaaaaactggatgtgccgttttatctgcatccgcgtaacccgctgccgcaggattcccgtatctacgacggtcacccgtggctgctgggtccgacctgggcgttcgcccaagaaacggcggtgcatgccctgcgtctgatggcatctggcctgtttgatgaacacccgcgtctgaatattatcctgggtcatctgggcgaaggtctgccgtacatgatgtaccgtatcgatcatcgtatcgcatgggttaaactgccgccgcgttatccggcaaaacgtcgctttatggactacttcaacgaaaattttcacattaccacgtcaggcaacttccgtacccagacgctgattgatgcaatcctggaaattggtgctgatcgcatcctgttctcgaccgactggccgtttgaaaacattgatcatgccgctgactggtttaatgctacgtctattgccgaagctgaccgtgtcaaaatcggccgcaccaatgcccgtcgtctgttcaaactggatggcgct

SEQ ID NO: 786 - DNA, 984 bp, Artificial Sequence
  synthetic construct; Dicamba decarboxylase variant
atggctcaaggcaaagtggcactggaagaacatttcgcaatcccggaaacgctgcaagactcggcaggcttcgtcccgggcgactactggaaagaactgcagcatcgtctgctggatatccaagacacccgcctgaaactgatggatgcgcacggcatcgaaacgatgattctgtccctggctgcaccggctgttcaggcgattccggaccgtcgcaaagccattgaaatcgcacgtcgcgctaatgatatgctggcagaagaatgcgctaaacgtccggaccgctttctggcattcgcagcactgccgctgcaggatccagacgcagctaccgaagaactgcaacgtaccgtcaacgatctgggcttcgtgggtgccctggttaatggctttagccaggaaggcgatggtcaaaccccgctgtattacgacctgccgcagtatcgcccgttctggggtgaagtcgaaaaactggatgtgccgttttatctgcatccgcgtaacccgctgccgcaggattcccgtatctacgacggtcacccgtggctgctgggtccgacctgggcgttcgcccaagaaacggcggtgcatgccctgcgtctgatggcatctggcctgtttgatgaacacccgcgtctgaatattatcctgggtcatatgggcgaaggtctgccgtacatgatgtaccgtatcgatcatcgtatcgcatgggttcacgagccgccgcgttatccggcaaaacgtcgctttatggactacttcaacgaaaattttcacattaccacgtcaggcaacttccgtacccagacgctgattgatgcaatcctggaaattggtgctgatcgcatcctgttctcgaccgactggccgtttgaaaacattgatcatgccactgcctggtttaatgctacgtctattgccgaagctgaccgtctgaaaatcggccgcaccaatgcccgtcgtctgttcaaactggatggtgac

SEQ ID NO: 787 - DNA, 984 bp, Artificial Sequence
  synthetic construct; Dicamba decarboxylase variant
atggctcaaggcaaagtggcactggaagaacatttcgcaatcccggagacgctgaacgactcggcaggcttcgtcccgggcgactactggaaagaactgcagcatcgtctgctggatatccaagacacccgcctgaaactgatggatgcgcacggcatcgaaacgatgattctgtccctggctgcaccggctgttcaggcgattccggaccgtcgcaaagccattgaaatcgcacgtcgcgctaatgatttcctggcagaagaatgcgctaaacgtccggaccgctttctggcattcgcagcactgccgctgcaggatccggacgcagctaccgaagaactgcaacgttgtgtcaacgatctgggcttcgtgggtgccctggttaatggctttagcgtggaaggcgatggtcaaaccccgctgtattacgacctgccgcagtatcgcccgttctggggtgaagtcgaaaaactggatgtgccgttttatctgcatccgcgtaacccgctgccgcaggattcccgtatctacgacggtcacccgtggctgctgggtccgacctgggcgttcgcccaagaaacggcggtgcatgccctgcgtctgatggcatctggcctgtttgatgaacacccgcgtctgaatattatcctgggtcatatgggcgaaggtctgccgtacatgatgtaccgtatcgatcatcgtatcgcatgggttcacgagccgccgcgttatccggcaaaacgtcgctttatggactacttcaacgaaaattttcacattaccacgtcaggcaacttccgtacccagacgctgattgatgcaatcctggaaattggtgctgatcgcatcctgttctcgaccgactggccgtttgaaaacattgatcatgccgctgactggtttaatgctacgtctattgccgaagctgaccgtgtcaaaatcggccgcaccaatgcccgtcgtctgttcaaactggatctggac

SEQ ID NO: 788 - DNA, 984 bp, Artificial Sequence
  synthetic construct; Dicamba decarboxylase variant
atggctcaaggcaaagtggcactggaagaacatttcgcaatcccggagacgctgcaagactcggcaggcttcgtcccgggcgactactggaaagaactgcagcatcgtctgctggatatccaagacacccgcctgcgcctgatggatgcgcacggcatcgaaacgatgattctgtccctggctgcaccggctgttcaggcgattccggaccgtcgcaaagccattgaaatcgcacgtcgcgctaatgatttcctggcagaagaatgcgctaaacgtccggaccgctttctggcattcgcagcactgccgctgcaggatccggacgcagctaccgaagaactgcaacgttgcgtcaacactctgggcttcgtgggtgccctggttaatggctttagcgtggaaggcgatggtcaaaccccgctgtattacgacctgccgcagtatcgcccgttctggggtgaagtcgaaaaactggatgtgccgttttatctgcatccgcgtaacccgctgccgcaggattcccgtatctacgacggtcacccgtggctgctgggtccgacctgggcgttcgcccaagaaacggcggtgcatgccctgcgtctgatggcatctggcctgtttgatgaacacccgcgtctgaatattatcctgggtcatctgggcgaaggtctgccgtacatgatgtaccgtatcgatcatcgtatcgcatgggttcacgagccgccgcgttatccggcaaaacgtcgctttatggactacttcaacgaaaattttcacattaccacgtcaggcaacttccgtacccagacgctgattgatgcaatcctggaaattggtgctgatcgcatcctgttctcgaccgactggccgtttgaaaacattgatcatgccgctgactggtttaatgctacgtctattgccgaagctgaccgtctgaaaatcggccgcaccaatgcccgtcgtctgttcaaactggatggcgct

SEQ ID NO: 789 - DNA, 984 bp, Artificial Sequence
  synthetic construct; Dicamba decarboxylase variant
atggctcaaggcaaagtggcactggaagaacatttcgcaatcccggaaacgctgcaagactcggcaggcttcgtcccgggcgactactggaaagaactgcagcatcgtctgctggatatccaagacacccgcctgaaactgatggatgcgcacggcatcgaaacgatgattctgtccctggctgcaccggctgttcaggcgattccggaccgtcgcaaagccattgaaatcgcacgtcgcgctaatgatatgctggcagaagaatgcgctaaacgtccggaccgctttctggcattcgcagcactgccgctgcaggatccggacgcagctaccgaagaactgcaacgttgcgtcaacactctgggcttcgtgggtgccctggttaatggctttagccaggaaggcgatggtcaaaccccgctgtattacgacctgccgcagtatcgcccgttctggggtgaagtcgaaaaactggatgtgccgttttatctgcatccgcgtaacccgctgccgcaggattcccgtatctacgacggtcacccgtggctgctgggtccgacctgggcgttcgcccaagaaacggcggtgcatgccctgcgtctgatggcatctggcctgtttgatgaacacccgcgtctgaatattatcctgggtcatatgggcgaaggtctgccgtacatgatgtaccgtatcgatcatcgtatcgcatgggttcacgagccgccgcgttatccggcaaaacgtcgctttatggactacttcaacgaaaattttcacattaccacgtcaggcaacttccgtacccagacgctgattgatgcaatcctggaaattggtgctgatcgcatcctgttctcgaccgactggccgtttgaaaacattgatcatgccgctgactggtttaatgctacgtctattgccgaagctgaccgtgtcaaaatcggccgcaccaatgcccgtcgtctgttcaaactggatggtgac

SEQ ID NO: 790 - DNA, 984 bp, Artificial Sequence
  synthetic construct; Dicamba decarboxylase variant
atggctcaaggcaaagtggcactggaagaacatttcgcaatcccggagacgctgcaagactcggcaggcttcgtcccgggcgactactggaaagaactgcagcatcgtctgctggatatccaagacacccgcctgaaactgatggatgcgcacggcatcgaaacgatgattctgtccctggctgcagttggtgttcaggcgattccggaccgtcgcaaagccattgaaatcgcacgtcgcgctaatgatttcctggcagaagaatgcgctaaacgtccggaccgctttctggcattcgcagcactgccgctgcaggatccggacgcagctaccgaagaactgcaacgttgtgtcaacgacctgggcttcgtgggtgccctggttaatggctttagccaggaaggcgatggtcaaaccccgctgtattacgacctgccgcagtatcgcccgttctggggtgaagtcgaaaaactggatgtgccgttttatctgcatccgcgtaacccgctgccgcaggattcccgtatctacgacggtcacccgtggctgctgggtccgacctgggcgttcgcccaagaaacggcggtgcatgccctgcgtctgatggcatctggcctgtttgatgaacacccgcgtctgaatattatcctgggtcatctgggcgaaggtctgccgtacatgatgtaccgtatcgatcatcgtatcgcatgggttcacgagccgccgcgttatccggcaaaacgtcgctttatggactacttcaacgaaaattttcacattaccacgtcaggcaacttccgtacccagacgctgattgatgcaatcctggaaattggtgctgatcgcatcctgttctcgaccgactggccgtttgaaaacattgatcatgccgctgactggtttaatgctacgtctattgccgaagctgaccgtgtcaaaatcggccgcaccaatgcccgtcgtctgttcaaactggatggcgct

SEQ ID NO: 791 - DNA, 984 bp, Artificial Sequence
  synthetic construct; Dicamba decarboxylase variant
atggctcaaggcaaagtggcactggaagaacatttcgcaatcccggagacgctgaacgactcggcaggcttcgtcccgggcgactactggaaagaactgcagcatcgtctgctggatatccaagacacccgcctgaaactgatggatgcgcacggcatcggcacgatgattctgtccctggctgcaccggctgttcaggcgattccggaccgtcgcaaagccattgaaatcgcacgtcgcgctaatgatttcctggcagaagaatgcgctaaacgtccggaccgctttctggcattcgcagcactgccgctgcaggatccggacgcagctaccgaagaactgcaacgttgtgtcaacgatctgggcttcgtgggtgccctggttaatggctttagccaggaaggcgatggtcaaaccccgctgtattacgacctgccgcagtatcgcccgttctggggtgaagtcgaaaaactggatgtgccgttttatctgcatccgcgtaacccgctgccgcaggattcccgtatctacgacggtcacccgtggctgctgggtccgacctgggcgttcgcccaagaaacggcggtgcatgccctgcgtctgatggcatctggcctgtttgatgaacacccgcgtctgaatattatcctgggtcatatgggcgaaggtctgccgtacatgatgtaccgtatcgatcatcgtatcgcatgggttcacgagccgccgcgttatccggcaaaacgtcgctttatggactacttcaacgaaaattttcacattaccacgtcaggcaacttccgtacccagacgctgattgatgcaatcctggaaattggtgctgatcgcatcctgttctcgaccgactggccgtttgaaaacattgatcatgccactgcctggtttaatgctacgtctattgccgaagctgaccgtctgaaaatcggccgcaccaatgcccgtcgtctgttcaaactggatggcgct

SEQ ID NO: 792 - DNA, 984 bp, Artificial Sequence
  synthetic construct; Dicamba decarboxylase variant
atggctcaaggcaaagtggcactggaagaacatttcgcaatcccggagacgctgaacgactcggcaggcttcgtcccgggcgactactggaaagaactgcagcatcgtctgctggatatccaagacacccgcctgaaactgatggatgcgcacggcatcgaaacgatgattctgtccctggctgcaccggctgttcaggcgattccggaccgtcgcaaagccattgaaatcgcacgtcgcgctaatgatttcctggcagaagaatgcgctaaacgtccggaccgctttctggcattcgcagcactgccgctgcaggatccggacgcagctaccgaagaactgcaacgttgtgtcaacgatctgggcttcgtgggtgccctggttaatggctttagccaggaaggcgatggtcaaaccccgctgtattacgacctgccgcagtatcgcccgttctggggtgaagtcgaaaaactggatgtgccgttttatctgcatccgcgtaacccgctgccgcaggattcccgtatctacgacggtcacccgtggctgctgggtccgacctgggcgttcgcccaagaaacggcggtgcatgccctgcgtctgatggcatctggcctgtttgatgaacacccgcgtctgaatattatcctgggtcatatgggcgaaggtctgccgtacatgatgtaccgtatcgatcatcgtatcgcatgggttaaactgccgccgcgttatccggcaaaacgtcgctttatggactacttcaacgaaaattttcacattaccacgtcaggcaacttccgtacccagacgctgattgatgcaatcctggaaattggtgctgatcgcatcctgttctcgaccgactggccgtttgaaaacattgatcatgccgctgcctggtttaatgctacgtctattgccgaagctgaccgtctgaaaatcggccgcaccaatgcccgtcgtctgttcaaactggatggcgct

SEQ ID NO: 793 - DNA, 984 bp, Artificial Sequence
  synthetic construct; Dicamba decarboxylase variant
atggctcaaggcaaagtggcactggaagaacatttcgcaatcccggaaacgctgcaagactcggcaggcttcgtcccgggcgactactggaaagaactgcagcatcgtctgctggatatccaagacacccgcctgaaactgatggatgcgcacggcatcggcacgatgattctgtccctggctgcagttggtgttcaggcgattccggaccgtcgcaaagccattgaaatcgcacgtcgcgctaatgatttcctggcagaagaatgcgctaaacgtccggaccgctttctggcattcgcaacactgccgctgcaggatccggacgcagctaccgaagaactgcaacgttgcgtcaacaatctgggcttcgtgggtgccctggttaatggctttagccaggaaggcgatggtcaaaccccgctgtattacgacctgccgcagtatcgcccgttctggggtgaagtcgaaaaactggatgtgccgttttatctgcatccgcgtaacccgctgccgcaggattcccgtatctacgacggtcacccgtggctgctgggtccgacctgggcgttcgtccaagaaacggcggtgcatgccctgcgtctgatggcatctggcctgtttgatgaacacccgcgtctgaatattatcctgggtcatatgggcgaaggtctgccgtacatgatgtaccgtatcgatcatcgtatcgcatgggttaaactgccgccgcgttatccggcaaaacgtcgctttatggactacttcaacgaaaattttcacattaccacgtcaggcaacttccgtacccagacgctgattgatgcaatcctggaaattggtgctgatcgcatcctgttctcgaccgactggccgtttgaaaacattgatcatgccgctgactggtttaatgctacgtctattgccgaagctgaccgtgtcaaaatcggccgcaccaatgcccgtcgtctgttcaaactggatggcgct

SEQ ID NO: 794 - DNA, 984 bp, Artificial Sequence
  synthetic construct; Dicamba decarboxylase variant
atggctcaaggcaaagtggcactggaagaacatttcgcaatcccggaaacgctgcaagactcggcaggcttcgtcccgggcgactactggaaagaactgcagcatcgtctgctggatatccaagacacccgcctgcgcctgatggatgcgcacggcatcgaaacgatgattctgtccctggctgcaccggctgttcaggcgattccggaccgtcgcaaagccattgaaatcgcacgtcgcgctaatgatttcctggcagaagaatgcgctaaacgtccggaccgctttctggcattcgcagcactgccgctgcaggatccggacgcagctaccgaagaactgcaacgttgtgtcaacgatctgggcttcgtgggtgccctggttaatggctttagccaggaaggcgatggtcaaaccccgctgtattacgacctgccgcagtatcgcccgttctggggtgaagtcgaaaaactggatgtgccgttttatctgcatccgcgtaacccgctgccgcaggattcccgtatctacgacggtcacccgtggctgctgggtccgacctgggcgttcgcccaagaaacggcggtgcatgccctgcgtctgatggcatctggcctgtttgatgaacacccgcgtctgaatattatcctgggtcatctgggcgaaggtctgccgtacatgatgtaccgtatcgatcatcgtatcgcatgggttaaactgccgccgcgttatccggcaaaacgtcgctttatggactacttcaacgaaaattttcacattaccacgtcaggcaacttccgtacccagacgctgattgatgcaatcctggaaattggtgctgatcgcatcctgttctcgaccgactggccgtttgaaaacattgatcatgccgctgactggtttaatgctacgtctattgccgaagctgaccgtgtcaaaatcggccgcaccaatgcccgtcgtctgttcaaactggatggtgac

SEQ ID NO: 795 - DNA, 984 bp, Artificial Sequence
  synthetic construct; Dicamba decarboxylase variant
atggctcaaggcaaagtggcactggaagaacatttcgcaatcccggaaacgctgcaagactcggcaggcttcgtcccgggcgactactggaaagaactgcagcatcgtctgctggatatccaagacacccgcctgaaactgatggatgcgcacggcatcgaaacgatgattctgtccctggctgcaccgggtgttcaggcgattccggaccgtcgcaaagccattgaaatcgcacgtcgcgctaatgatatcctggcagaagaatgcgctaaacgtccggaccgctttctggcattcgcagcactgccgatgcaggatccagacgcagctaccgaagaactgcaacgttgtgtcaacgatctgggcttcgtgggtgccctggttaatggctttagccaggaaggcgatggtcaaaccccgctgtattacgacctgccgcagtatcgcccgttctggggtgaagtcgaaaaactggatgtgccgttttatctgcatccgcgtaacccgctgccgcaggattcccgtatctacgacggtcacccgtggctgctgggtccgacctgggcgttcgcccaagaaacggcggtgcatgccctgcgtctgatggcatctggcctgtttgatgaacacccgcgtctgaatattatcctgggtcatatgggcgaaggtctgccgtacatgatgtaccgtatcgatcatcgtatcgcatgggttcaagagccgccgcgttatccggcaaaacgtcgctttatggactacttcaacgaaaattttcacattaccacgtcaggcaacttccgtacccagacgctgattgatgcaatcctggaaattggtgctgatcgcatcctgttctcgaccgactggccgtttgaaaacattgatcatgccgctgactggtttaatgctacgtctattgccgaagctgaccgtgtgaaaatcggccgcaccaatgcccgtcgtctgttcaaactggatggtgat

SEQ ID NO: 796 - DNA, 984 bp, Artificial Sequence
  synthetic construct; Dicamba decarboxylase variant
atggctcaaggcaaagtggcactggaagaacatttcgcaatcccggaaacgctgcaagactcggcaggcttcgtcccgggcgactactggaaagaactgcagcatcgtctgctggatatccaagacacccgcctgaaactgatggatgcgcacggcatcgaaacgatgattctgtccctggctgcaccggctgttcaggcgattccggaccgtcgcaaagccattgaaatcgcacgtcgcgctaatgatttcctggcagaagaatgcgctaaacgtccggaccgctttctggcattcgcagcactgccgctgcaggatccggacgcagctagcgaagaactgcaacgttgcgtcaacgatctgggcttcgtgggtgccctggttaatggctttagccaggaaggcgatggtcaaaccccgctgtattacgacctgccgcagtatcgcccgttctggggtgaagtcgaaaaactggatgtgccgttttatctgcatccgcgtaacccgctgccgcaggattcccgtacctacgacggtcacccgtggctgctgggtccgacctgggcgttcgcccaagaaacggcggtgcatgccctgcgtctgatggcatctggcctgtttgatgaacacccgcgtctgaatattatcctgggtcatatgggcgaaggtctgccgtacatgatgtaccgtatcgatcatcgtatcgcatgggttcacgagccgccgcgttatccggcaaaacgtcgctttatggactacttcaacgaaaattttcacattaccacgtcaggcaacttccgtacccagacgctgattgatgcaatcctggaaattggtgctgatcgcatcctgttctcgaccgactggccgtttgaaaacattgatcatgccgctgactggtttaatgctacgtctattgccgaagctgaccgtgtcaaaatcggccgcaccaatgcccgtcgtctgttcaaactggatggtgac

SEQ ID NO: 797 - DNA, 984 bp, Artificial Sequence
  synthetic construct; Dicamba decarboxylase variant
atggctcaaggcaaagtggcactggaagaacatttcgcaatcccggaaacgctgcaagactcggcaggcttcgtcccgggcgactactggaaagaactgcagcatcgtctgctggatatccaagacacccgcctgaaactgatggatgcgcacggcatcgaaacgatgattctgtccctggctgcaccggctgttcaggcgattccggaccgtcgcaaagccattgaaatcgcacgtcgcgctaatgatttcctggcagaagaatgcgctaaacgtccggaccgctttctggcattcgcagcactgccgatgcaggatccagacgcagctagcgaagaactgcaacgtaccgtcaacgatctgggcttcgtgggtgccctggttaatggctttagccaggaaggcgatggtcaaaccccgctgtattacgacctgccgcagtatcgcccgttctggggtgaagtcgaaaaactggatgtgccgttttatctgcatccgcgtaacccgctgccgcaggattcccgtatctacgacggtcacccgtggctgctgggtccgacctgggcgttcgcccaagaaacggcggtgcatgccctgcgtctgatggcatctggcctgtttgatgaacacccgcgtctgaatattatcctgggtcatatgggcgaaggtctgccgtacatgatgtaccgtatcgatcatcgtatcgcatgggttcacgagccgccgcgttatccggcaaaacgtcgctttatggactacttcaacgaaaattttcacattaccacgtcaggcaacttccgtacccagacgctgattgatgcaatcctggaaattggtgctgatcgcatcctgttctcgaccgactggccgtttgaaaacattgatcatgccgctgactggtttaatgctacgtctattgccgaagctgaccgtgtcaaaatcggccgcaccaatgcccgtcgtctgttcaaactggatctggac

SEQ ID NO: 798 - DNA, 984 bp, Artificial Sequence
  synthetic construct; Dicamba decarboxylase variant
atggctcaaggcaaagtggcactggaagaacatttcgcaatcccggagacgctgcaggactcggcaggcttcgtcccgggcgactactggaaagaactgcagcatcgtctgctggatatccaagacacccgcctgaaactgatggatgcgcacggcatcgaaacgatgattctgtccctggctgcaccggctgttcaggcgattccggaccgtcgcaaagccattgaaatcgcacgtcgcgctaatgatttcctggcagaagaatgcgctaaacgtccggaccgctttctggcattcgcagcactgccgctgcaggatccggacgcagctaccgaagaactgcaacgttgtgtcaacgatctgggcttcgtgggtgccctggttaatggctttagcctggaaggcgatggtcaaaccccgctgtattacgacctgccgcagtatcgcccgttctggggtgaagtcgaaaaactggatgtgccgttttatctgcatccgcgtaacccgctgccgcaggattcccgtatctacgacggtcacccgtggctgctgggtccgacctgggcgttcgcccaagaaacggcggtgcatgccctgcgtctgatggcatctggcctgtttgatgaacacccgcgtctgaatattatcctgggtcatatgggcgaaggtctgccgtacatgatgtaccgtatcgatcatcgtatcgcatgggttaaactgccgccgcgttatccggcaaaacgtcgctttatggactacttcaacgaaaattttcacattaccacgtcaggcaacttccgtacccagacgctgattgatgcaatcctggaaattggtgctgatcgcatcctgttctcgaccgactggccgtttgaaaacattgatcatgccgctgactggtttaatgctacgtctattgccgaagctgaccgtgtcaaaatcggccgcaccaatgcccgtcgtctgttcaaactggatggtgac

SEQ ID NO: 799 - DNA, 984 bp, Artificial Sequence
  synthetic construct; Dicamba decarboxylase variant
atggctcaaggcaaagtggcactggaagaacatttcgcaatcccggaaacgctgcaagactcggcaggcttcgtcccgggcgactactggaaagaactgcagcatcgtctgctggatatccaagacacccgcctgaaactgatggatgcgcacggcatcgaaacgatgattctgtccctggctgcaccggctgttcaggcgattccggaccgtcgtaaagccattgaaatcgcacgtcgcgctaatgatttcctggcagaagaatgcgctaaacgtccggaccgctttctggcattcgcagcactgccgctgcaggatccggacgcagctaccgaagaactgcaacgttgtgtcaacgatctgggcttcgtgggtgccctggttaatggctttagccaggaaggcgatggtcaaaccccgctgtattacgacctgccgcagtatcgcccgttctggggtgaagtcgaaaaactggatgtgccgttttatctgcatccgcgtaacccgctgccgcaggattcccgtatctacgacggtcacccgtggctgctgggtccgacctgggcgttcgcccaagaaacggcggtgcatgccctgcgtctgatggcatctggcctgtttgatgaacacccgcgtctgaatattatcctgggtcatctgggcgaaggtctgccgtacatgatgtaccgtatcgatcatcgtatcgcatgggttaaactgccgccgcgttatccggcaaaacgtcgctttatggactacttcaacgaaaattttcacattaccacgtcaggcaacttccgtacccagacgctgattgatgcaatcctggaaattggtgctgatcgcatcctgttctcgaccgactggccgtttgaaaacattgatcatgccgctgactggtttaatgctacgtctattgccgaagctgaccgtctgaaaatcggccgcaccaatgcccgtcgtctgttcaaactggatggcgct

SEQ ID NO: 800 - DNA, 984 bp, Artificial Sequence
  synthetic construct; Dicamba decarboxylase variant
atggctcaaggcaaagtggcactggaagaacatttcgcaatcccggaaacgctgcaagactcggcaggcttcgtcccgggcgactactggaaagaactgcagcatcgtctgctggatatccaagacacccgcctgaaactgatggatgcgcacggcatcgaaacgatgattctgtccctggctgcaccggctgttcaggcgattccggaccgtcgcaaagccattgaaatcgcacgtcgcgctaatgatttcctggcagaagaatgcgctaaacgtccggaccgctttctggcattcgcagcactgccgctgcaggatgtggacgcagctaccgaagaactgcaacgttgcgtcaacgatctgggcttcgtgggtgccctggttaatggctttagcgtggaaggcgatggtcaaaccccgctgtattacgacctgccgcagtatcgcccgttctggggtgaagtcgaaaaactggatgtgccgttttatctgcatccgcgtaacccgctgccgcaggattcccgtatctacgacggtcacccgtggctgctgggtccgacctgggcgttcgcccaagaaacggcggtgcatgccctgcgtctgatggcatctggcctgtttgatgaacacccgcgtctgaatattatcctgggtcatctgggcgaaggtctgccgtacatgatgtaccgtatcgatcatcgtatcgcatgggttcacgagccgccgcgttatccggcaaaacgtcgctttatggactacttcaacgaaaattttcacattaccacgtcaggcaacttccgtacccagacgctgattgatgcaatcctggaaattggtgctgatcgcatcctgttctcgaccgactggccgtttgaaaacattgatcatgccgctgactggtttaatgctacgtctattgccgaagctgaccgtgtgaaaatcggccgcaccaatgcccgtcgtctgttcaaactggatggcgat

SEQ ID NO: 801 - DNA, 984 bp, Artificial Sequence
  synthetic construct; Dicamba decarboxylase variant
atggctcaaggcaaagtggcactggaagaacatttcgcaatcccggaaacgctgcaagactcggcaggcttcgtcccgggcgactactggaaagaactgcagcatcgtctgctggatatccaagacacccgcctgaaactgatggatgcgcacggcatcgaaacgatgattctgtccctggctgcaccggctgttcaggcgattccggaccgtcgcaaagccattgaaatcgcacgtcgcgctaatgatttcctggcagaagaatgcgctaaacgtccggaccgctttctggcattcgcagcactgccgctgcaggatccggacgcagctaccgaagaactgcaacgttgtgtcaacgatctgggcttcgtgggtgccctggttaatggctttagccaggaaggcgatggtcaaaccccgctgtattacgacctgccgcagtatcgcccgttctggggtgaagtcgagaaactggatgtgccgttttatctgcatccgcgtaacccgctgccgcaggattcccgtatctacgacggtcacccgtggctgctgggtccgacctgggcgttcgcccaagaaacggcggtgcatgccctgcgtctgatggcatctggcctgtttgatgaacacccgcgtctgaatattatcctgggtcatctgggcgaaggtctgccgtacatgatgtaccgtatcgatcatcgtatcgcatgggttaaactgccgccgcgttatccggcaaaacgtcgctttatggactacttcaacgaaaattttcacattaccacgtcaggcaacttccgtacccagacgctgattgatgcaatcctggaaattggtgctgatcgcatcctgttctcgaccgactggccgtttgaaaacattgatcatgccgctgactggtttaatgctacgtctattgccgaagctgaccgtgtcaaaatcggccgcaccaatgcccgtcgtctgttcaaactggatggtgac

SEQ ID NO: 802 - DNA, 984 bp, Artificial Sequence
  synthetic construct; Dicamba decarboxylase variant
atggctcaaggcaaagtggcactggaagaacatttcgcaatcccggcgacgctgaacgactcggcaggcttcgtcccgggcgactactggaaagaactgcagcatcgtctgctggatatccaagacacccgcctgaaactgatggatgcgcacggcatcgaaacgatgattctgtccctggctgcaccggctgttcaggcgattccggaccgtcgcaaagccattgaaatcgcacgtcgcgctaatgatttcctggcagaagaatgcgctaaacgtccggaccgctttctggcattcgcagcactgccgatgcaggatccggacgcagctaccgaagaactgcaacgttgtgtcaacgatctgggcttcgtgggtgccctggttaatggctttagcgtggaaggcgatggtcaaaccccgctgtattacgacctgccgcagtatcgcccgttctggggtgaagtcgaaaaactggatgtgccgttttatctgcatccgcgtaacccgctgccgcaggattcccgtatctacgacggtcacccgtggctgctgggtccgacctgggcgttcgcccaagaaacggcggtgcatgccctgcgtctgatggcatctggcctgtttgatgaacacccgcgtctgaatattatcctgggtcatatgggcgaaggtctgccgtacatgatgtaccgtatcgatcatcgtatcgcatgggttcacccaccgccgcgttatccggcaaaacgtcgctttatggactacttcaacgaaaattttcacattaccacgtcaggcaacttccgtacccagacgctgattgatgcaatcctggaaattggtgctgatcgcatcctgttctcgaccgactggccgtttgaaaacattgatcatgccgctgactggtttaatgctacgtctattgccgaagctgaccgtgtcaaaatcggccgcaccaatgcccgtcgtctgttcaaactggatggtgac

SEQ ID NO: 803 - DNA, 984 bp, Artificial Sequence
  synthetic construct; Dicamba decarboxylase variant
atggctcaaggcaaagtggcactggaagaacatttcgcaatcccggaaacgctgcaggactcggcaggcttcgtcccgggcgactactggaaagaactgcagcatcgtctgctggatatccaagacacccgcctgcgcctgatggatgcgcacggcatcgaaacgatgattctgtccctggctgcaccggctgttcaggcgattccggaccgtcgcaaagccattgaaatcgcacgtcgcgctaatgatttcctggcagaagaatgcgctaaacgtccggaccgctttctggcattcgcagcactgccgctgcaggatccggacgcagctaccgaagaactgcaacgttgcgtcaacgatctgggcttcgtgggtgccctggttaatggctttagccaggaaggcgatggtcaaaccccgctgtattacgacctgccgcagtatcgcccgttctggggtgaagtcgaaaaactggatgtgccgttttatctgcatccgcgtaacccgctgccgcaggattcccgtatctacgacggtcacccgtggctgctgggtccgacctgggcgttcgcccaagaaacggcggtgcatgccctgcgtctgatggcatctggcctgtttgatgaacacccgcgtctgaatattatcctgggtcatatgggcgaaggtctgccgtacatgatgtaccgtatcgatcatcgtatcgcatgggttcacgagccgccgcgttatccggcaaaacgtcgctttatggactacttcaacgaaaattttcacattaccacgtcaggcaacttccgtacccagacgctgattgatgcaatcctggaaattggtgctgatcgcatcctgttctcgaccgactggccgtttgaaaacattgatcatgccgctgactggtttaatgctacgtctattgccgaagctgaccgtgtcaaaatcggccgcaccaatgcccgtcgtctgttcaaactggatctggac

SEQ ID NO: 804 - DNA, 984 bp, Artificial Sequence
  synthetic construct; Dicamba decarboxylase variant
atggctcaaggcaaagtggcactggaagaacatttcgcaatcccggaaacgctgaacgactcggcaggcttcgtcccgggcgactactggaaagaactgcagcatcgtctgctggatatccaagacacccgcctgaaactgatggatgcgcacggcatcgaaacgatgattctgtccctggctgcaccggctgttcaggcgattccggaccgtcgcaaagccattgaaatcgcacgtcgcgctaatgatttcctggcagaagaatgcgctaaacgtccggaccgctttctggcgttcgcagcactgccgctgcaggatccggacgcagctaccgaagaactgcaacgttgtgtcaacgatctgggcttcgtgggtgccctggttaatggctttagccaggaaggcgatggtcaaaccccgctgtattacgacctgccgcagtatcgcccgttctggggtgaagtcgaaaaactggatgtgccgttttatctgcatccgcgtaacccgctgccgcaggattcccgtatctacgacggtcacccgtggctgctgggtccgacctgggcgttcgcccaagaaacggcggtgcatgccctgcgtctgatggcatctggcctgtttgatgaacacccgcgtctgaatattatcctgggtcatatgggcgaaggtctgccgtacatgatgtaccgtatcgatcatcgtatcgcatgggttaaactgccgccgcgttatccggcaaaacgtcgctttatggactacttcaacgaaaattttcacattaccacgtcaggcaacttccgtacccagacgctgattgatgcaatcctggaaattggtgctgatcgcatcctgttctcgaccgactggccgtttgaaaacattgatcatgccgctgactggtttaatgctacgtctattgccgaagctgaccgtctgaaaatcggccgcaccaatgcccgtcgtctgttcaaactggatggcgct

SEQ ID NO: 805 - DNA, 984 bp, Artificial Sequence
  synthetic construct; Dicamba decarboxylase variant
atggctcaaggcaaagtggcactggaagaacatttcgcaatcccggaaacgctgcaagactcggcaggcttcgtcccgggcgactactggaaagaactgcagcatcgtctgctggatatccaagacacccgcctgaaactgatggatgcgcacggcatcgaaacgatgattctgtccctggctgcaccggctgttcaggcgattccggaccgtcgcaaagccattgaaatcgcacgtcgcgctaatgatttcctggcagaagaatgcgctaaacgtccggaccgctttctggcattcgcagcactgccgctgcaggatccagacgcagctaccgaagaactgcaacgtaccgtcaacgacctgggcttcgtgggtgccctggttaatggctttagccaggaaggcgatggtcaaaccccgctgtattacgacctgccgcagtatcgcccgttctggggtgaagtcgaaaaactggatgtgccgttttatctgcatccgcgtaacccgctgccgcaggattcccgtatctacgacggtcacccgtggctgctgggtccgacctgggcgttcgcccaagaaacggcggtgcatgccctgcgtctgatggcatctggcctgtttgatgaacacccgcgtctgaatattatcctgggtcatctgggcgaaggtctgccgtacatgatgtaccgtatcgatcatcgtatcgcatgggttcacgagccgccgcgttatccggcaaaacgtcgctttatggactacttcaacgaaaattttcacattaccacgtcaggcaacttccgtacccagacgctgattgatgcaatcctggaaattggtgctgatcgcatcctgttctcgaccgactggccgtttgaaaacattgatcatgccgctgactggtttaatgctacgtctattgccgaagctgaccgtgtcaaaatcggccgcaccaatgcccgtcgtctgttcaaactggatggtgac

SEQ ID NO: 806 - DNA, 984 bp, Artificial Sequence
  synthetic construct; Dicamba decarboxylase variant
atggctcaaggcaaagtggcactggaagaacatttcgcaatcccggaaacgctgcaagactcggcaggcttcgtcccgggcgactactggaaagaactgcagcatcgtctgctggatatccaagacacccgcctgaaactgatggatgcgcacggcatcgaaacgatgattctgtccctggctgcaccggctgttcaggcgattccggaccgtcgcaaagccattgaaatcgcacgtcgcgctaatgatttcctggcagaagaatgcgctaaacgtccggaccgctttctggcattcgcagcactgccgatgcaggatccggacgcagctaccgaagaactgcaacgtaccgtcaacgacctgggcttcgtgggtgccctggttaatggctttagccaggaaggcgatggtcaaaccccgctgtattacgacctgccgcagtatcgcccgttctggggtgaagtcgaaaaactggatgtgccgttttatctgcatccgcgtaacccgctgccgcaggattcccgtatctacgacggtcacccgtggctgctgggtccgacctgggcgttcgcccaagaaacggcggtgcatgccctgcgtctgatggcatctggcctgtttgatgaacacccgcgtctgaatattatcctgggtcatctgggcgaaggtctgccgtacatgatgtaccgtatcgatcatcgtatcgcatgggttaaactgccgccgcgttatccggcaaaacgtcgctttatggactacttcaacgaaaattttcacattaccacgtcaggcaacttccgtacccagacgctgattgatgcaatcctggaaattggtgctgatcgcatcctgttctcgaccgactggccgtttgaaaacattgatcatgccgctgactggtttaatgctacgtctattgccgaagctgaccgtgtcaaaatcggccgcaccaatgcccgtcgtctgttcaaactggatggtgac

SEQ ID NO: 807 - DNA, 984 bp, Artificial Sequence
  synthetic construct; Dicamba decarboxylase variant
atggctcaaggcaaagtggcactggaagaacatttcgcaatcccggaaacgctgcaagactcggcaggcttcgtcccgggcgactactggaaagaactgcagcatcgtctgctggatatccaagacacccgcctgaaactgatggatgcgcacggcatcgaaacgatgattctgtccctggctgcaccgggtgttcaggcgattccggaccgtcgcaaagccattgaaatcgcacgtcgcgctaatgatttcctggcagaagaatgcgctaaacgtccggaccgctttctggcattcgcagcactgccgatgcaggatgtggacgcagctaccgaagaactgcaacgttgtgtcaacgatctgggcttcgtgggtgccctggttaatggctttagccaggaaggcgatggtcaaaccccgctgtattacgacctgccgcagtatcgcccgttctggggtgaagtcgaaaaactggatgtgccgttttatctgcatccgcgtaacccgctgccgcaggattcccgtatctacgacggtcacccgtggctgctgggtccgacctgggcgttcgcccaagaaacggcggtgcatgccctgcgtctgatggcatctggcctgtttgatgaacacccgcgtctgaatattatcctgggtcatatgggcgaaggtctgccgtacatgatgtaccgtatcgatcatcgtatcgcatgggttcacgagccgccgcgttatccggcaaaacgtcgctttatggactacttcaacgaaaattttcacattaccacgtcaggcaacttccgtacccagacgctgattgatgcaatcctggaaattggtgctgatcgcatcctgttctcgaccgactggccgtttgaaaacattgatcatgccgctgactggtttaatgctacgtctattgccgaagctgaccgtgtcaaaatcggccgcaccaatgcccgtcgtctgttcaaactggatgtggac

SEQ ID NO: 808 - DNA, 984 bp, Artificial Sequence
  synthetic construct; Dicamba decarboxylase variant
atggctcaaggcaaagtggcactggaagaacatttcgcaatcccggaaacgctgcaagactcggcaggcttcgtcccgggcgactactggaaagaactgcagcatcgtctgctggatatccaagacacccgcctgaaactgatggatgcgcacggcatcgaaacgatgattctgtccctggctgcaccggctgttcaggcgattccggaccgtcgcaaagccattgaaatcgcacgtcgcgctaatgatttcctggcagaagaatgcgctaaacgtccggaccgctttctggcattcgcagcactgccgctgcaggatccggacgcagctaccgaagaactgcaacgttgtgtcaacgatctgggcttcgtgggtgccctggttaatggctttagccaggaaggcgatggtcaaaccccgctgtattacgacctgccgcagtatcgcccgttctggggtgaagtcgaaaaactggatgtgccgttttatctgcatccgcgtaacccgctgccgcaggattcccgtatctacgacggtcacccgtggctgctgggtccgacctgggcgttcgcccaagaaacggcggtgcatgccctgcgtctgatggcatctggcctgtttgatgaacacccgcgtctgaatattatcctgggtcatatgggcgaaggtctgccgtacatgatgtaccgtatcgatcatcgtatcgcatgggttaaactgccgccgcgttatccggcaaaacgtcgctttatggactacttcaacgaaaattttcacattaccacgtcaggcaacttccgtacccagacgctgattgatgcaatcctggaaattggtgctgatcgcatcctgttctcgaccgactggccgtttgaaaacattgatcatgccgctgcctggtttaatgctacgtctattgccgaagctgaccgtgtcaaaatcggccgcaccaatgcccgtcgtctgttcaaactggatggtgac

SEQ ID NO: 809 - DNA, 984 bp, Artificial Sequence
  synthetic construct; Dicamba decarboxylase variant
atggctcaaggcaaagtggcactggaagaacatttcgcaatcccggagacgctgaacgactcggcaggcttcgtcccgggcgactactggaaagaactgcagcatcgtctgctggatatccaagacacccgcctgaaactgatggatgcgcacggcatcgaaacgatgattctgtccctggctgcaccggctgttcaggcgattccggaccgtcgcaaagccattgaaatcgcacgtcgcgctaatgatttcctggcagaagaatgcgctaaacgtccggaccgctttctggcattcgcagcactgccgctgcaggatccggacgcagctagcgaagaactgcaacgttgcgtcaacgacctgggcttcgtgggtgccctggttaatggctttagccaggaaggcgatggtcaaaccccgctgtattacgacctgccgcagtatcgcccgttctggggtgaagtcgaaaaactggatgtgccgttttatctgcatccgcgtaacccgctgccgcaggattcccgtatctacgacggtcacccgtggctgctgggtccgacctgggcgttcgcccaagaaacggcggtgcatgccctgcgtctgatggcatctggcctgtttgatgaacacccgcgtctgaatattatcctgggtcatatgggcgaaggtctgccgtacatgatgtaccgtatcgatcatcgtatcgcatgggttaaactgccgccgcgttatccggcaaaacgtcgctttatggactacttcaacgaaaattttcacattaccacgtcaggcaacttccgtacccagacgctgattgatgcaatcctggaaattggtgctgatcgcatcctgttctcgaccgactggccgtttgaaaacattgatcatgccactgcctggtttaatgctacgtctattgccgaagctgaccgtctgaaaatcggccgcaccaatgcccgtcgtctgttcaaactggatctggac

SEQ ID NO: 810 - DNA, 984 bp, Artificial Sequence
  synthetic construct; Dicamba decarboxylase variant
atggctcaaggcaaagtggcactggaagaacatttcgcaatcccggaaacgctgcaagactcggcaggcttcgtcccgggcgactactggaaagaactgcaacatcgtctgctggatatccaagacacccgcctgaaactgatggatgcgcacggcatcgaaacgatgattctgtccctggctgcaccggctgttcaggcgattccggaccgtcgcaaagccattgaaatcgcacgtcgcgctaatgatatgctggcagaagaatgcgctaaacgtccggaccgctttctggcattcgcagcactgccgctgcaggatccggacgcagctaccgaagaactgcaacgttgcgtcaacgacctgggcttcgtgggtgccctggttaatggctttagcgtggaaggcgatggtcaaaccccgctgtattacgacctgccgcagtatcgcccgttctggggtgaagtcgaaaaactggatgtgccgttttatctgcatccgcgtaacccgctgccgcaggattcccgtatctacgacggtcacccgtggctgctgggtccgacctgggcgttcgcccaagaaacggcggtgcatgccctgcgtctgatggcatctggcctgtttgatgaacacccgcgtctgaatattatcctgggtcatctgggcgaaggtctgccgtacatgatgtaccgtatcgatcatcgtatcgcatgggttcacgagccgccgcgttatccggcaaaacgtcgctttatggactacttcaacgaaaattttcacattaccacgtcaggcaacttccgtacccagacgctgattgatgcaatcctggaaattggtgctgatcgcatcctgttctcgaccgactggccgtttgaaaacattgatcatgccgctgactggtttaatgctacgtctattgccgaagctgaccgtctgaaaatcggccgcaccaatgcccgtcgtctgttcaaactggatggtgac

SEQ ID NO: 811 - DNA, 984 bp, Artificial Sequence
  synthetic construct; Dicamba decarboxylase variant
atggctcaaggcaaagtggcactggaagaacatttcgcaatcccggaaacgctgcaagactcggcaggcttcgtcccgggcgactactggaaagaactgcagcatcgtctgctggatatccaagacacccgcctgaaactgatggatgcgcacggcatcgaaacgatgattctgtccctggctgcaccggctgttcaggcgattccggaccgtcgcaaagccattgaaatcgcacgtcgcgctaatgatttcctggcagaagaatgcgctaaacgtccggaccgctttctggcattcgcagcactgccgctgcaggatccagacgcagctagcgaagaactgcaacgttgtgtcaacgatctgggcttcgtgggtgccctggttaatggctttagcgtggaaggcgatggtcaaaccccgctgtattacgacctgccgcagtatcgcccgttctggggtgaagtcgaaaaactggatgtgccgttttatctgcatccgcgtaacccgctgccgcaggattcccgtatctacgacggtcacccgtggctgctgggtccgacctgggcgttcgcccaagaaacggcggtgcatgccctgcgtctgatggcatctggcctgtttgatgaacacccgcgtctgaatattatcctgggtcatatgggcgaaggtctgccgtacatgatgtaccgtatcgatcatcgtatcgcatgggttcacgagccgccgcgttatccggcaaaacgtcgctttatggactacttcaacgaaaattttcacattaccacgtcaggcaacttccgtacccagacgctgattgatgcaatcctggaaattggtgctgatcgcatcctgttctcgaccgactggccgtttgaaaacattgatcatgccgctgactggtttaatgctacgtctattgccgaagctgaccgtgtcaaaatcggccgcaccaatgcccgtcgtctgttcaaactggatctggac

SEQ ID NO: 812 - DNA, 984 bp, Artificial Sequence
  synthetic construct; Dicamba decarboxylase variant
atggctcaaggcaaagtggcactggaagaacatttcgcaatcccggaaacgctgcaagactcggcaggcttcgtcccgggcgactactggaaagaactgcagcatcgtctgctggatatccaagacacccgcctgaaactgatggatgcgcacggcatcgaaacgatgattctgtccctggctgcaccggctgttcaggcgattccggaccgtcgcaaagccattgaaatcgcacgtcgcgctaatgatttcctggcagaagaatgcgctaaacgtccggaccgctttctggcattcgcagcactgccgctgcaggatccggacgcagctaccgaagaactgcaacgttgtgtcaacgatctgggcttcgtgggtgccctggttaatggctttagcgtggaaggcgatggtcaaaccccgctgtattacgacctgccgcagtatcgcccgttctggggtgaagtcgaaaaactggatgtgccgttttatctgcatccgcgtaacccgctgccgcaggattcccgtatctacgacggtcacccgtggctgctgggtccgacctgggcgttcgcccaagaaacggcggtgcatgccctgcgtctgatggcatctggcctgtttgatgaacacccgcgtctgaatattatcctgggtcatatgggcgaaggtctgccgtacatgatgtaccgtatcgatcatcgtatcgcatgggttaaactgccgccgcgttatccggcaaaacgtcgctttatggactacttcaacgaaaattttcacattaccacgtcaggcaacttccgtacccagacgctgattgatgcaatcctggaaattggtgctgatcgcatcctgttctcgaccgactggccgtttgaaaacattgatcatgccactgcctggtttaatgctacgtctattgccgaagctgaccgtctgaaaatcggccgcaccaatgcccgtcgtctgttcaaactggatggcgct

SEQ ID NO: 813 - DNA, 984 bp, Artificial Sequence
  synthetic construct; Dicamba decarboxylase variant
atggctcaaggcaaagtggcactggaagaacatttcgcaatcccggagacgctgaacgactcggcaggcttcgtcccgggcgactactggaaagaactgcagcatcgtctgctggatatccaagacacccgcctgaaactgatggatgcgcacggcatcgaaacgatgattctgtccctggctgcaccggctgttcaggcgattccggaccgtcgcaaagccattgaaatcgcacgtcgcgctaatgatttcctggcagaagaatgcgctaaacgtccggaccgctttctggcattcgcagcactgccgctgcaggatccggacgcagctaccgaagaactgcaacgttgtgtcaacgatctgggcttcgtgggtgccctggttaatggctttagccaggaaggcgatggtcaaaccccgctgtattacgacctgccgcagtatcgcccgttctggggtgaagtcgaaaaactggatgtgccgttttatctgcatccgcgtaacccgctgccgcaggattcccgtatctacgacggtcacccgtggctgctgggtccgacctgggcgttcgcccaagaaacggcggtgcatgccctgcgtctgatggcatctggcctgtttgatgaacacccgcgtctgaatattatcctgggtcatctgggcgaaggtctgccgtacatgatgtaccgtatcgatcatcgtatcgcatgggttaaactgccgccgcgttatccggcaaaacgtcgctttatggactacttcaacgaaaattttcacattaccacgtcaggcaacttccgtacccagacgctgattgatgcaatcctggaaattggtgctgatcgcatcctgttctcgaccgactggccgtttgaaaacattgatcatgccgctgactggtttaacgaaacgtctattgccgaagctgaccgtgtcaaaatcggccgcaccaatgcccgtcgtctgttcaaactggatggcgct

SEQ ID NO: 814 - DNA, 984 bp, Artificial Sequence
  synthetic construct; Dicamba decarboxylase variant
atggctcaaggcaaagtggcactggaagaacatttcgcaatcccggaaacgctgcaagactcggcaggcttcgtcccgggcgactactggaaagaactgcagcatcgtctgctggatatccaagacacccgcctgaaactgatggatgcgcacggcatcgaaacgatgattctgtccctggctgcaccggctgttcaggcgattccggaccgtcgtcaagccattgaaatcgcacgtcgcgctaatgatttcctggcagaagaatgcgctaaacgtccggaccgctttctggcattcgcagcactgccgctgcaggatccggacgcagctaccgaagaactgcaacgttgtgtcaacgatctgggcttcgtgggtgccctggttaatggctttagcgtggaaggcgatggtcaaaccccgctgtattacgacctgccgcagtatcgcccgttctggggtgaagtcgaaaaactggatgtgccgttttatctgcatccgcgtaacccgctgccgcaggattcccgtatctacgacggtcacccgtggctgctgggtccgacctgggcgttcgcccaagaaacggcggtgcatgccctgcgtctgatggcatctggcctgtttgatgaacacccgcgtctgaatattatcctgggtcatctgggcgaaggtctgccgtacatgatgtaccgtatcgatcatcgtatcgcatgggttaaactgccgccgcgttatccggcaaaacgtcgctttatggactacttcaacgaaaattttcacattaccacgtcaggcaacttccgtacccagacgctgattgatgcaatcctggaaattggtgctgatcgcatcctgttctcgaccgactggccgtttgaaaacattgatcatgccgctgactggtttaatgctacgtctattgccgaagctgaccgtctgaaaatcggccgcaccaatgcccgtcgtctgttcaaactggatggcgct

SEQ ID NO: 815 - DNA, 984 bp, Artificial Sequence
  synthetic construct; Dicamba decarboxylase variant
atggctcaaggcaaagtggcactggaagaacatttcgcaatcccggaaacgctgcaagactcggcaggcttcgtcccgggcgactactggaaagaactgcagcatcgtctgctggatatccaagacacccgcctgaaactgatggatgcgcacggcatcgaaacgatgattctgtccctggctgcaccggctgttcaggcgattccggaccgtcgcaaagccattgaaatcgcacgtcgcgctaatgatttcctggcagaagagtgcgctaaacgtccggaccgctttctggcattcgcagcactgccgctgcaggatccggacgcagctaccgaagaactgcaacgttgtgtcaacgatctgggcttcgtgggtgccctggttaatggctttagccaggaaggcgatggtcaaaccccgctgtattacgacctgccgcagtatcgcccgttctggggtgaagtcgaaaaactggatgtgccgttttatctgcatccgcgtaacccgctgccgcaggattcccgtatctacgacggtcacccgtggctgctgggtccgacctgggcgttcgcccaagaaacggcggtgcatgccctgcgtctgatggcatctggcctgtttgatgaacacccgcgtctgaatattatcctgggtcatatgggcgaaggtctgccgtacatgatgtaccgtatcgatcatcgtatcgcatgggttaaactgccgccgcgttatccggcaaaacgtcgctttatggactacttcaacgaaaattttcacattaccacgtcaggcaacttccgtacccagacgctgattgatgcaatcctggaaattggtgctgatcgcatcctgttctcgaccgactggccgtttgaaaacattgatcatgccgctgactggtttaatgctacgtctattgccgaagctgaccgtctgaaaatcggccgcaccaatgcccgtcgtctgttcaaactggatggcgct

SEQ ID NO: 816 - DNA, 984 bp, Artificial Sequence
  synthetic construct; Dicamba decarboxylase variant
atggctcaaggcaaagtggcactggaagaacatttcgcaatcccggaaacgctgcaagactcggcaggcttcgtcccgggcgactactggaaagaactgcagcatcgtctgctggatatccaagacacccgcctgaaactgatggatgcgcacggcatcgagacgatgattctgtccctggctgcaccggctgttcaggcgattccggaccgtcgcaaagccattgaaatcgcacgtcgcgctaatgatatgctggcagaagaatgcgctaaacgtccggaccgctttctggcattcgcagcactgccgctgcaggatccggacgcagctaccgaagaactgcaacgttgcgtcaacgacctgggcttcgtgggtgccctggttaatggctttagccaggaaggcgatggtcaaaccccgctgtattacgacctgccgcagtatcgcccgttctggggtgaagtcgaaaaactggatgtgccgttttatctgcatccgcgtaacccgctgccgcaggattcccgtatctacgacggtcacccgtggctgctgggtccgacctgggcgttcgcccaagaaacggcggtgcatgccctgcgtctgatggcatctggcctgtttgatgaacacccgcgtctgaatattatcctgggtcatatgggcgaaggtctgccgtacatgatgtaccgtatcgatcatcgtatcgcatgggttcacgagccgccgcgttatccggcaaaacgtcgctttatggactacttcaacgaaaattttcacattaccacgtcaggcaacttccgtacccagacgctgattgatgcaatcctggaaattggtgctgatcgcatcctgttctcgaccgactggccgtttgaaaacattgatcatgccgctgactggtttaatgctacgtctattgccgaagctgaccgtgtcaaaatcggccgcaccaatgcccgtcgtctgttcaaactggatctggac

SEQ ID NO: 817 - DNA, 984 bp, Artificial Sequence
  synthetic construct; Dicamba decarboxylase variant
atggctcaaggcaaagtggcactggaagaacatttcgcaatcccggaaacgctgcaagactcggcaggcttcgtcccgggcgactactggaaagaactgcagcatcgtctgctggatatccaagacacccgcctgaaactgatggatgcgcacggcatcgaaacgatgattctgtccctggctgcaccgggtgttcaggcgattccggaccgtcgcaaagccattgaaatcgcacgtcgcgctaatgatatcctggcagaagaatgcgctaaacgtccggaccgctttctggcattcgcagcactgccgctgcaggatccggacgcagctaccgaagaactgcaacgttgtgtcaacgatctgggcttcgtgggtgccctggttaatggctttagccaggaaggcgatggtcaaaccccgctgtattacgacctgccgcagtatcgcccgttctggggtgaagtcgaaaaactggatgtgccgttttatctgcatccgcgtaacccgctgccgcaggattcccgtatctacgacggtcacccgtggctgctgggtccgacctgggcgttcgcccaagaaacggcggtgcatgccctgcgtctgatggcatctggcctgtttgatgaacacccgcgtctgaatattatcctgggtcatatgggcgaaggtctgccgtacatgatgtaccgtatcgatcatcgtatcgcatgggttcaagagccgccgcgttatccggcaaaacgtcgctttatggactacttcaacgaaaattttcacattaccacgtcaggcaacttccgtacccagacgctgattgatgcaatcctggaaattggtgctgatcgcatcctgttctcgaccgactggccgtttgaaaacattgatcatgccgctgactggtttaatgctacgtctattgccgaagctgaccgtgtcaaaatcggccgcaccaatgcccgtcgtctgttcaaactggatggcgct

SEQ ID NO: 818 - DNA, 984 bp, Artificial Sequence
  synthetic construct; Dicamba decarboxylase variant
atggctcaaggcaaagtggcactggaagaacatttcgcaatcccggaaacgctgcaagactcggcaggcttcgtcccgtctgaatacctgaaagaactgcagcatcgtctgctggatatccaagacacccgcctgaaactgatggatgcgcacggcatcgaaacgatgattctgtccctggctgcaccggctgttcaggcgattccggaccgtcgcaaagccattgaaatcgcacgtcgcgctaatgatttcctggcagaagaatgcgctaaacgtccggaccgctttctggcattcgcagcactgccgctgcaggatccagacgcagctaccgaagaactgcaacgtaccgtcaacgatctgggcttcgtgggtgccctggttaatggctttagccaggaaggcgatggtcaaaccccgctgtattacgacctgccgcagtatcgcccgttctggggtgaagtcgaaaaactggatgtgccgttttatctgcatccgcgtaacccgctgccgcaggattcccgtatctacgacggtcacccgtggctgctgggtccgacctgggcgttcgcccaagaaacggcggtgcatgccctgcgtctgatggcatctggcctgtttgatgaacacccgcgtctgaatattatcctgggtcatatgggcgaaggtctgccgtacatgatgtaccgtatcgatcatcgtatcgcatgggttaaactgccgccgcgttatccggcaaaacgtcgctttatggactacttcaacgaaaattttcacattaccacgtcaggcaacttccgtacccagacgctgattgatgcaatcctggaaattggtgctgatcgcatcctgttctcgaccgactggccgtttgaaaacattgatcatgccgctgactggtttaatgctacgtctattgccgaagctgaccgtgtcaaaatcggccgcaccaatgcccgtcgtctgttcaaactggatggcgct

SEQ ID NO: 819 - DNA, 984 bp, Artificial Sequence
  synthetic construct; Dicamba decarboxylase variant
atggctcaaggcaaagtggcactggaagaacatttcgcaatcccggaaacgctgcaagactcggcaggcttcgtcccgggcgactactggaaagaactgcagcatcgtctgctggatatccaagacacccgcctgaaactgatggatgcgcacggcatcgagacgatgattctgtccctggctgcaccggctgttcaggcgattccggaccgtcgcaaagccattgaaatcgcacgtcgcgctaatgatttcctggcagaagaatgcgctaaacgtccggaccgctttctggcattcgcagcactgccgctgcaggatccggacgcagctaccgaagaactgcaacgttgcgtcaacgacctgggcttcgtgggtgccctggttaatggctttagccaggaaggcgatggtcaaaccccgctgtattacgacctgccgcagtatcgcccgttctggggtgaagtcgaaaaactggatgtgccgttttatctgcatccgcgtaacccgctgccgcaggattcccgtatctacgacggtcacccgtggctgctgggtccgacctgggcgttcgcccaagaaacggcggtgcatgccctgcgtctgatggcatctggcctgtttgatgaacacccgcgtctgaatattatcctgggtcatatgggcgaaggtctgccgtacatgatgtaccgtatcgatcatcgtatcgcatgggttcacgagccgccgcgttatccggcaaaacgtcgctttatggactacttcaacgaaaattttcacattaccacgtcaggcaacttccgtacccagacgctgattgatgcaatcctggaaattggtgctgatcgcatcctgttctcgaccgactggccgtttgaaaacattgatcatgccgctgactggtttaatgctacgtctattgccgaagctgaccgtgtcaaaatcggccgcaccaatgcccgtcgtctgttcaaactggatggcgct

SEQ ID NO: 820 - DNA, 984 bp, Artificial Sequence
  synthetic construct; Dicamba decarboxylase variant
atggctcaaggcaaagtggcactggaagaacatttcgcaatcccggaaacgctgcaagactcggcaggcttcgtcccgggcgactactggaaagaactgcagcatcgtctgctggatatccaagacacccgcctgaaactgatggatgcgcacggcatcgaaacgatgattctgtccctggctgcaccggctgttcaggcgattccggaccgtgtacaagccattgaaatcgcacgtcgcgctaatgatttcctggcagaagaatgcgctaaacgtccggaccgctttctggcattcgcagcactgccgctgcaggatccggacgcagctaccgaagaactgcaacgttgtgtcaacgatctgggcttcgtgggtgccctggttaatggctttagccaggaaggcgatggtcaaaccccgctgtattacgacctgccgcagtatcgcccgttctggggtgaagtcgaaaaactggatgtgccgttttatctgcatccgcgtaacccgctgccgcaggattcccgtatctacgacggtcacccgtggctgctgggtccgacctgggcgttcgcccaagaaacggcggtgcatgccctgcgtctgatggcatctggcctgtttgatgaacacccgcgtctgaatattatcctgggtcatatgggcgaaggtctgccgtacatgatgtaccgtatcgatcatcgtatcgcatgggttaaactgccgccgcgttatccggcaaaacgtcgctttatggactacttcaacgaaaattttcacattaccacgtcaggcaacttccgtacccagacgctgattgatgcaatcctggaaattggtgctgatcgcatcctgttctcgaccgactggccgtttgaaaacattgatcatgccgctgactggtttaatgctacgtctattgccgaagctgaccgtctgaaaatcggccgcaccaatgcccgtcgtctgttcaaactggatctggac

SEQ ID NO: 821 - DNA, 984 bp, Artificial Sequence
  synthetic construct; Dicamba decarboxylase variant
atggctcaaggcaaagtggcactggaagaacatttcgcaatcccggaaacgctgcaagactcggcaggcttcgtcccgggcgactactggaaagaactgcagcatcgtctgctggatatccaagacacccgcctgaaactgatggatgcgcacggcatcgaaacgatgattctgtccctggctgcaccggctgttcaggcgattccggaccgtcgcaaagccattgaaatcgcacgtcgcgctaatgatttcctggcagaagaatgcgctaaacgtccggaccgctttctggcattcgcagcactgccgctgcaggatccggacgcagctaccgaagaactgcaacgtaccgtcaacgatctgggcttcgtgggtgccctggttaatggctttagcgtggaaggcgatggtcaaaccccgctgtattacgacctgccgcagtatcgcccgttctggggtgaagtcgaaaaactggatgtgccgttttatctgcatccgcgtaacccgctgccgcaggattcccgtatctacgacggtcacccgtggctgctgggtccgacctgggcgttcgcccaagaaacggcggtgcatgccctgcgtctgatggcatctggcctgtttgatgaacacccgcgtctgaatattatcctgggtcatatgggcgaaggtctgccgtacatgatgtaccgtatcgatcatcgtatcgcatgggttaaactgccgccgcgttatccggcaaaacgtcgctttatggactacttcaacgaaaattttcacattaccacgtcaggcaacttccgtacccagacgctgattgatgcaatcctggaaattggtgctgatcgcatcctgttctcgaccgactggccgtttgaaaacattgatcatgccgctgactggtttaatgctacgtctattgccgaagctgaccgtgtcaaaatcggccgcaccaatgcccgtcgtctgttcaaactggatggtgac

SEQ ID NO: 822 - DNA, 984 bp, Artificial Sequence
  synthetic construct; Dicamba decarboxylase variant
atggctcaaggcaaagtggcactggaagaacatttcgcaatcccggaaacgctgcaagactcggcaggcttcgtcccgggcgactactggaaagaactgcagcatcgtctgctggatatccaagacacccgcctgaaactgatggatgcgcacggcatcgaaacgatgattctgtccctggctgcaccgggtgttcaggcgattccggaccgtcgcaaagccattgaaatcgcacgtcgcgctaatgatatgctggcagaagaatgcgctaaacgtccggaccgctttctggcattcgcagcactgccgctgcaggatgtggacgcagctaccgaagaactgcaacgttgtgtcaacgatctgggcttcgtgggtgccctggttaatggctttagcgtggaaggcgatggtcaaaccccgctgtattacgacctgccgcagtatcgcccgttctggggtgaagtcgaaaaactggatgtgccgttttatctgcatccgcgtaacccgctgccgcaggattcccgtatctacgacggtcacccgtggctgctgggtccgacctgggcgttcgcccaagaaacggcggtgcatgccctgcgtctgatggcatctggcctgtttgatgaacacccgcgtctgaatattatcctgggtcatatgggcgaaggtctgccgtacatgatgtaccgtatcgatcatcgtatcgcatgggttcacgagccgccgcgttatccggcaaaacgtcgctttatggactacttcctggaaaattttcacattaccacgtcaggcaacttccgtacccagacgctgattgatgcaatcctggaaattggtgctgatcgcatcctgttctcgaccgactggccgtttgaaaacattgatcatgccgctgactggtttaatgctacgtctattgccgaagctgaccgtctgaaaatcggccgcaccaatgcccgtcgtctgttcaaactggatggtgac

SEQ ID NO: 823 - DNA, 984 bp, Artificial Sequence
  synthetic construct; Dicamba decarboxylase variant
atggctcaaggcaaagtggcactggaagaacatttcgcaatcccggaaacgctgcaagactcggcaggcttcgtcccgggcgactactggaaagaactgcagcatcgtctgctggatatccaagacacccgcctgcgcctgatggatgcgcacggcatcgaaacgatgattctgtccctggctgcaccggctgttcaggcgattccggaccgtcgcaaagccattgaaatcgcacgtcgcgctaatgatttcctggcagaagaatgcgctaaacgtccggaccgctttctggcattcgcagcactgccgctgcaggatccggacgcagctaccgaagaactgcaacgttgtgtcaacgacctgggcttcgtgggtgccctggttaatggctttagccaggaaggcgatggtcaaaccccgctgtattacgacctgccgcagtatcgcccgttctggggtgaagtcgaaaaactggatgtgccgttttatctgcatccgcgtaacccgctgccgcaggattcccgtatctacgacggtcacccgtggctgctgggtccgacctgggcgttcgcccaagaaacggcggtgcatgccctgcgtctgatggcatctggcctgtttgatgaacacccgcgtctgaatattatcctgggtcatatgggcgaaggtctgccgtacatgatgtaccgtatcgatcatcgtatcgcatgggttcacgagccgccgcgttatccggcaaaacgtcgctttatggactacttcaacgaaaattttcacattaccacgtcaggcaacttccgtacccagacgctgattgatgcaatcctggaaattggtgctgatcgcatcctgttctcgaccgactggccgtttgaaaacattgatcatgccgctgactggtttaatgctacgtctattgccgaagctgaccgtgtcaaaatcggccgcaccaatgcccgtcgtctgttcaaactggatggcgct

SEQ ID NO: 824 - DNA, 984 bp, Artificial Sequence
  synthetic construct; Dicamba decarboxylase variant
atggctcaaggcaaagtggcactggaagaacatttcgcaatcccggaaacgctgcaagactcggcaggcttcgtcccgggcgactactggaaagaactgcagcatcgtctgctggatatccaagacacccgcctgaaactgatggatgcgcacggcatcgaaacgatgattctgtccctggctgcaccggctgttcaggcgattccggaccgtcgtaaagccattgaaatcgcacgtcgcgctaatgatttcctggcagaagaatgcgctaaacgtccggaccgctttctggcattcgcagcactgccgctgcaggatgtggacgcagctagcgaagaactgcaacgttgcgtcaacgatctgggcttcgtgggtgccctggttaatggctttagcgtggaaggcgatggtcaaaccccgctgtattacgacctgccgcagtatcgcccgttctggggtgaagtcgaaaaactggatgtgccgttttatctgcatccgcgtaacccgctgccgcaggattcccgtatctacgacggtcacccgtggctgctgggtccgacctgggcgttcgcccaagaaacggcggtgcatgccctgcgtctgatggcatctggcctgtttgatgaacacccgcgtctgaatattatcctgggtcatatgggcgaaggtctgccgtacatgatgtaccgtatcgatcatcgtatcgcatgggttaaactgccgccgcgttatccggcaaaacgtcgctttatggactacttcaacgaaaattttcacattaccacgtcaggcaacttccgtacccagacgctgattgatgcaatcctggaaattggtgctgatcgcatcctgttctcgaccgactggccgtttgaaaacattgatcatgccgctgactggtttaatgctacgtctattgccgaagctgaccgtctgaaaatcggccgcaccaatgcccgtcgtctgttcaaactggatggtgac

SEQ ID NO: 825 - DNA, 984 bp, Artificial Sequence
  synthetic construct; Dicamba decarboxylase variant
atggctcaaggcaaagtggcactggaagaacatttcgcaatcccggaaacgctgcaagactcggcaggcttcgtcccgggcgactactggaaagaactgcagcatcgtctgctggatatccaagacacccgcctgcgcctgatggatgcgcacggcatcgaaacgatgattctgtccctggctgcaccggctgttcaggcgattccggaccgtcgcaaagccattgaaatcgcacgtcgcgctaatgatttcctggcagaagaatgcgctaaacgtccggaccgctttctggcattcgcagcactgccgctgcaggatccggacgcagctaccgaagaactgcaacgtaccgtcaacgacctgggcttcgtgggtgccctggttaatggctttagccaggaaggcgatggtcaaaccccgctgtattacgacctgccgcagtatcgcccgttctggggtgaagtcgaaaaactggatgtgccgttttatctgcatccgcgtaacccgctgccgcaggattcccgtatctacgacggtcacccgtggctgctgggtccgacctgggcgttcgcccaagaaacggcggtgcatgccctgcgtctgatggcatctggcctgtttgatgaacacccgcgtctgaatattatcctgggtcatctgggcgaaggtctgccgtacatgatgtaccgtatcgatcatcgtatcgcatgggttaaactgccgccgcgttatccggcaaaacgtcgctttatggactacttcctggaaaattttcacattaccacgtcaggcaacttccgtacccagacgctgattgatgcaatcctggaaattggtgctgatcgcatcctgttctcgaccgactggccgtttgaaaacattgatcatgccgctgactggtttaatgctacgtctattgccgaagctgaccgtctgaaaatcggccgcaccaatgcccgtcgtctgttcaaactggatggccgt

SEQ ID NO: 826 - DNA, 984 bp, Artificial Sequence
  synthetic construct; Dicamba decarboxylase variant
atggctcaaggcaaagtggcactggaagaacatttcgcaatcccggaaacgctgcaagactcggcaggcttcgtcccgggcgactactggaaagaactgcagcatcgtctgctggatatccaagacacccgcctgaaactgatggatgcgcacggcatcgaaacgatgattctgtccctggctgcaccggctgttcaggcgattccggaccgtcgcaaagccattgaaatcgcacgtcgcgctaatgatatgctggcagaagaatgcgctaaacgtccggaccgctttctggcattcgcagcactgccgctgcaggatccggacgcagctaccgaagaactgcaacgttgtgtcaacgatctgggcttcgtgggtgccctggttaatggctttagcgtggaaggcgatggtcaaaccccgctgtattacgacctgccgcagtatcgcccgttctggggtgaagtcgaaaaactggatgtgccgttttatctgcatccgcgtaacccgctgccgcaggattcccgtatctacgacggtcacccgtggctgctgggtccgacctgggcgttcgcccaagaaacggcggtgcatgccctgcgtctgatggcatctggcctgtttgatgaacacccgcgtctgaatattatcctgggtcatctgggcgaaggtctgccgtacatgatgtaccgtatcgatcatcgtatcgcatgggttcacgagccgccgcgttatccggcaaaacgtcgctttatggactacttcaacgaaaattttcacattaccacgtcaggcaacttccgtacccagacgctgattgatgcaatcctggaaattggtgctgatcgcatcctgttctcgaccgactggccgtttgaaaacattgatcatgccgctgactggtttaatgctacgtctattgccgaagctgaccgtgtcaaaatcggccgcaccaatgcccgtcgtctgttcaaactggatctggac

SEQ ID NO: 827 - DNA, 984 bp, Artificial Sequence
  synthetic construct; Dicamba decarboxylase variant
atggctcaaggcaaagtggcactggaagaacatttcgcaatcccggaaacgctgcaagactcggcaggcttcgtcccgggcgactactggaaagaactgcagcatcgtctgctggatatccaagacacccgcctgaaactgatggatgcgcacggcatcgagacgatgattctgtccctggctgcaccggctgttcaggcgattccggaccgtcgcaaagccattgaaatcgcacgtcgcgctaatgatttcctggcagaagaatgcgctaaacgtccggaccgctttctggcattcgcagcactgccgctgcaggatccagacgcagctaccgaagaactgcaacgttgcgtcaacgatctgggcttcgtgggtgccctggttaatggctttagcgtggaaggcgatggtcaaaccccgctgtattacgacctgccgcagtatcgcccgttctggggtgaagtcgaaaaactggatgtgccgttttatctgcatccgcgtaacccgctgccgcaggattcccgtatctacgacggtcacccgtggctgctgggtccgacctgggcgttcgcccaagaaacggcggtgcatgccctgcgtctgatggcatctggcctgtttgatgaacacccgcgtctgaatattatcctgggtcatatgggcgaaggtctgccgtacatgatgtaccgtatcgatcatcgtatcgcatgggttaaactgccgccgcgttatccggcaaaacgtcgctttatggactacttcaacgaaaattttcacattaccacgtcaggcaacttccgtacccagacgctgattgatgcaatcctggaaattggtgctgatcgcatcctgttctcgaccgactggccgtttgaaaacattgatcatgccgctgactggtttaatgctacgtctattgccgaagctgaccgtctgaaaatcggccgcaccaatgcccgtcgtctgttcaaactggatggtgac

SEQ ID NO: 828 - DNA, 984 bp, Artificial Sequence
  synthetic construct; Dicamba decarboxylase variant
atggctcaaggcaaagtggcactggaagaacatttcgcaatcccggaaacgctgcaagactcggcaggcttcgtcccgggcgactactggaaagaactgcagcatcgtctgctggatatccaagacacccgcctgaaactgatggatgcgcacggcatcgaaacgatgattctgtccctggctgcaccggctgttcaggcgattccggaccgtcgcaaagccattgaaatcgcacgtcgcgctaatgatttcctggcagaagaatgcgctaaacgtccggaccgctttctggcattcgcagcactgccgctgcaggatccggacgcagctaccgaagaactgcaacgttgcgtcaacgacctgggcttcgtgggtgccctggttaatggctttagcgtggaaggcgatggtcaaaccccgctgtattacgacctgccgcagtatcgcccgttctggggtgaagtcgaaaaactggatgtgccgttttatctgcatccgcgtaacccgctgccgcaggattcccgtatctacgacggtcacccgtggctgctgggtccgacctgggcgttcgcccaagaaacggcggtgcatgccctgcgtctgatggcatctggcctgtttgatgaacacccgcgtctgaatattatcctgggtcatatgggcgaaggtctgccgtacatgatgtaccgtatcgatcatcgtatcgcatgggttcacgagccgccgcgttatccggcaaaacgtcgctttatggactacttcaacgaaaattttcacattaccacgtcaggcaacttccgtacccagacgctgattgatgcaatcctggaaattggtgctgatcgcatcctgttctcgaccgactggccgtttgaaaacattgatcatgccactgactggtttaatgctacgtctattgccgaagctgaccgtgtcaaaatcggccgcaccaatgcccgtcgtctgttcaaactggatggtgac

SEQ ID NO: 829 - DNA, 984 bp, Artificial Sequence
  synthetic construct; Dicamba decarboxylase variant
atggctcaaggcaaagtggcactggaagaacatttcgcaatcccggaaacgctgcaagactcggcaggcttcgccccgggcgactactggaaagaactgcagcatcgtctgctggatatccaagacacccgcctgaaactgatggatgcgcacggcatcgaaacgatgattctgtccctggctgcaccggctgttcaggcgattccggaccgtcgcaaagccattgaaatcgcacgtcgcgctaatgatttcctggcagaagaatgcgctaaacgtccggaccgctttctggcattcgcagcactgccgctgcaggatccggacgcagctaccgaagaactgcaacgttgtgtcaacgatctgggcttcgtgggtgccctggttaatggctttagccaggaaggcgatggtcaaaccccgctgtattacgacctgccgcagtatcgcccgttctggggtgaagtcgaaaaactggatgtgccgttttatctgcatccgcgtaacccgctgccgcaggattcccgtatctacgacggtcacccgtggctgctgggtccgacctgggcgttcgcccaagaaacggcggtgcatgccctgcgtctgatggcatctggcctgtttgatgaacacccgcgtctgaatattatcctgggtcatctgggcgaaggtctgccgtacatgatgtaccgtatcgatcatcgtatcgcatgggttcacgagccgccgcgttatccggcaaaacgtcgctttatggactacttcaacgaaaattttcacattaccacgtcaggcaacttccgtacccagacgctgattgatgcaatcctggaaattggtgctgatcgcatcctgttctcgaccgactggccgtttgaaaacattgatcatgccgctgactggtttaatgctacgtctattgccgaagctgaccgtgtcaaaatcggccgcaccaatgcccgtcgtctgttcaaactggatggtgac

SEQ ID NO: 830 - DNA, 984 bp, Artificial Sequence
  synthetic construct; Dicamba decarboxylase variant
atggctcaaggcaaagtggcactggaagaacatttcgcaatcccggaaacgctgcaagactcggcaggcttcgtcccgggcgactactggaaagaactgcagcatcgtctgctggatatccaagacacccgcctgaaactgatggatgcgcacggcatcgaaacgatgattctgtccctggctgcaccggctgttcaggcgattccggaccgtcgcaaagccattgaaatcgcacgtcgcgctaatgatttcctggcagaagaatgcgctaaacgtccggaccgctttctggcattcgcagcactgccgctgcaggatccggacgcagctaccgaagaactgcaacgtaccgtcaacgacctgggcttcgtgggtgccctggttaatggctttagccaggaaggcgatggtcaaaccccgctgtattacgacctgccgcagtatcgcccgttctggggtgaagtcgaaaaactggatgtgccgttttatctgcatccgcgtaacccgctgccgcaggattcccgtatctacgacggtcacccgtggctgctgggtccgacctgggcgttcgcccaagaaacggcggtgcatgccctgcgtctgatggcatctggcctgtttgatgaacacccgcgtctgaatattatcctgggtcatatgggcgaaggtctgccgtacatgatgtaccgtatcgatcatcgtatcgcatgggttaaactgccgccgcgttatccggcaaaacgtcgctttatggactacttcaacgaaaattttcacattaccacgtcaggcaacttccgtacccagacgctgattgatgcaatcctggaaattggtgctgatcgcatcctgttctcgaccgactggccgtttgaaaacattgatcatgccactgactggtttaatgctacgtctattgccgaagctgaccgtgtcaaaatcggccgcaccaatgcccgtcgtctgttcaaactggatggcgct

SEQ ID NO: 831 - DNA, 984 bp, Artificial Sequence
  synthetic construct; Dicamba decarboxylase variant
atggctcaaggcaaagtggcactggaagaacatttcgcaatcccggaaacgctgcaagactcggcaggcttcgtcccgggcgactactggaaagaactgcagcatcgtctgctggatatccaagacacccgcctgaaactgatggatgcgcacggcatcgaaacgatgattctgtccctggctgcaccggctgttcaggcgattccggaccgtcgcaaagccattgaaatcgcacgtcgcgctaatgatttcctggcagaagaatgcgctaaacgtccggaccgctttctggcattcgcagcactgccgatgcaggatccggacgcagctaccgaagaactgcaacgttgtgtcaacgatctgggcttcgtgggtgccctggttaatggctttagccaggaaggcgatggtcaaaccccgctgtattacgacctgccgcagtatcgcccgttctggggtgaagtcgaaaaactggatgtgccgttttatctgcatccgcgtaacccgctgccgcaggattcccgtatctacgacggtcacccgtggctgctgggtccgacctgggcgttcgcccaagaaacggcggtgcatgccctgcgtctgatggcatctggcctgtttgatgaacacccgcgtctgaatattatcctgggtcatatgggcgaaggtctgccgtacatgatgtaccgtatcgatcatcgtatcgcatgggttcaagagccgccgcgttatccggcaaaacgtcgctttatggactacttcaacgaaaattttcacattaccacgtcaggcaacttccgtacccagacgctgattgatgcaatcctggaaattggtgctgatcgcatcctgttctcgaccgactggccgtttgaaaacattgatcatgccgctgactggtttaatgctacgtctattgccgaagctgaccgtgtcaaaatcggccgcaccaatgcccgtcgtctgttcaaactggatgtggat

SEQ ID NO: 832 - DNA, 984 bp, Artificial Sequence
  synthetic construct; Dicamba decarboxylase variant
atggctcaaggcaaagtggcactggaagaacatttcgcaatcccggaaacgctgaacgactcggcaggcttcgtcccgggcgactactggaaagaactgcagcatcgtctgctggatatccaagacacccgcctgaaactgatggatgcgcacggcatcgaaacgatgattctgtccctggctgcaccggctgttcaggcgattccggaccgtcgcaaagccattgaaatcgcacgtcgcgctaatgatttcctggcagaagaatgcgctaaacgtccggaccgctttctggcattcgcagcactgccgctgcaggatccggacgcagctaccgaagaactgcaacgttgtgtcaacgatctgggcttcgtgggtgccctggttaatggctttagccaggaaggcgatggtcaaaccccgctgtattacgacctgccgcagtatcgcccgttctggggtgaagtcgaaaaactggatgtgccgttttatctgcatccgcgtaacccgctgccgcaggattcccgtatctacgacggtcacccgtggctgctgggtccgacctgggcgttcgcccaagaaacggcggtgcatgccctgcgtctgatggcatctggcctgtttgatgaacacccgcgtctgaatattatcctgggtcatctgggcgaaggtctgccgtacatgatgtaccgtatcgatcatcgtatcgcatgggttcacgagccgccgcgttatccggcaaaacgtcgctttatggactacttcaacgaaaattttcacattaccacgtcaggcaacttccgtacccagacgctgattgatgcaatcctggaaattggtgctgatcgcatcctgttctcgaccgactggccgtttgaaaacattgatcatgccgctgcctggtttaatgctacgtctattgccgaagctgaccgtgtcaaaatcggccgcaccaatgcccgtcgtctgttcaaactggatggcgct

SEQ ID NO: 833 - DNA, 984 bp, Artificial Sequence
  synthetic construct; Dicamba decarboxylase variant
atggctcaaggcaaagtggcactggaagaacatttcgcaatcccggaaacgctgcaagacacggcaggcttcgtcccgggcgactactggaaagaactgcagcatcgtctgctggatatccaagacacccgcctgaaactgatggatgcgcacggcatcgaaacgatgattctgtccctggctgcaccggctgttcaggcgattccggaccgtcgcaaagccattgaaatcgcacgtcgcgctaatgatttcctggcagaagaatgcgctaaacgtccggaccgctttctggcattcgcagcactgccgctgcaggatccagacgcagctaccgaagaactgcaacgtaccgtcaacgatctgggcttcgtgggtgccctggttaatggctttagccaggaaggcgatggtcaaaccccgctgtattacgacctgccgcagtatcgcccgttctggggtgaagtcgaaaaactggatgtgccgttttatctgcatccgcgtaacccgctgccgcaggattcccgtatctacgacggtcacccgtggctgctgggtccgacctgggcgttcgcccaagaaacggcggtgcatgccctgcgtctgatggcatctggcctgtttgatgaacacccgcgtctgaatattatcctgggtcatatgggcgaaggtctgccgtacatgatgtaccgtatcgatcatcgtatcgcatgggttaaactgccgccgcgttatccggcaaaacgtcgctttatggactacttcaacgaaaattttcacattaccacgtcaggcaacttccgtacccagacgctgattgatgcaatcctggaaattggtgctgatcgcatcctgttctcgaccgactggccgtttgaaaacattgatcatgccgctgactggtttaatgctacgtctattgccgaagctgaccgtgtcaaaatcggccgcaccaatgcccgtcgtctgttcaaactggatggtgac

SEQ ID NO: 834 - DNA, 984 bp, Artificial Sequence
  synthetic construct; Dicamba decarboxylase variant
atggctcaaggcaaagtggcactggaagaacatttcgcaatcccggaaacgctgcaagacgccgcaggtttcgtcccgggcgactactggaaagaactgcagcatcgtctgctggatatccaagacactcgcctgaaactgatggataaacacgagatcgaaacgatgattctgtccctggctgcaccggctgttcaggcgattccggaccgtcgcaaagccattgaaatcgcacgtcgcgctaatgatttcctggcagaagaagttgctaaacgtccggaccgctttctggcattcgcagcactgccgctgcaggatccggacgcagctaccgaggaactgcaacgttgtgtcaacgatctgggcttcgtgggtgccctggttaatggctttagccaggaaggcgatggtcaaaccccgctgtattacgacctgccgcagtatcgcccgttctggggtgaagtcgaaaaactggatgtgccgttttatctgcatccgcgtaacccgctgccgcaggattcccgtatctacgacggtcacccgtggctgctgggtccgacctgggcgttcgcccaagaaacggcggtgcatgccctgcgtctgatggcatctggcctgtttgatgaacacccgcgtctgaacattatcctgggtcatatgggcgaaggtctgccgtacatgatgtaccgtatcgatcatcgtatcgcatgggttaaagctccgccggattatgcggcaaaacgtcgctttatggactacttcaacgaaaattttcacattaccacgtcaggcaacttccgtacccagacgctgattgatgcaatcctggaaattggtgctgatcgcatcctgttctcgaccgactggccgtttgaaaacattgatcatgccgccgactggtttaatgctacgtctattgccgaagctgaccgtgtcaaaatcggccgcaccaatgcccgtcgtctgttcaaactggatggccgt

SEQ ID NO: 835 - DNA, 984 bp, Artificial Sequence
  synthetic construct; Dicamba decarboxylase variant
atggctcaaggcaaagtggcactggaagaacatttcgcaatcccggaaacgctgcaagacgccgcaggcttcgtcccgagcgactactggaaagaactgcagcatcgtctgctggatatccaagacactcgcctgaaactgatggataaacacgagatcgaaacgatgattctgtccctggctgcaccggctgttcaggcgattccggaccgtcgcaaagccattgaaatcgcacgtcgcgctaatgatttcctggcagaagaagttgctaaacgtccggaccgctttctggcattcgcagcactgccgctgcaggatccggacgcagctaccgaagaactgcaacgttgtgtccgggatctgggcttcgtgggtgccctggttaatggctttagcgttgaaggcgatggtcaaaccccgctgtattacgacctgccgcagtatcgcccgttctggaaagaagtcgaaaaactggatgtgccgttttatctgcatccgcgtaacccgctgccgcaggattcccgtatctacgacggtcacccgtggctgctgggtccgacctgggcgttcgcccaagaaacggcggtgcatgccctgcgtctgatggcatctggcctgtttgatgaacacccgcgtctgaacattatcctgggtcatcttggcgaaggtctgccgtacatgatgtaccgtatcgatcatcgtatcgggtgggttaaagctccgccggattatccggcaaaacgtcgctttatggactacttcctggaaaattttcacattaccacgtcaggcaacttccgtacccagacgctgattgatgcaatcctggaaattggtgctgatcgcatcctgttctcgaccgactggccgtttgaaaacattgatcatgccgctgactggtttaatgctacgtctattgccgaagctgaccgtttgaaaatcggccgcaccaatgcccgtcgtctgttcaaactggatctgcgt

SEQ ID NO: 836 - DNA, 984 bp, Artificial Sequence
  synthetic construct; Dicamba decarboxylase variant
atggctcaaggcaaagtggcactggaagaacatttcgcaatcccggaaacgctgaatgacgccgcaggtttcgtcccgggcgaatactggaaagaactgcagcatcgtctgctggatatccaagacactcgcctgaaactgatggataaacacgagatcgaaacgatgattctgtccctggctgcaccggctgttcaggcgattccggaccgtcgcaaagccattgaaatcgcacgtcgcgctaatgatttcctggcagaagaagttgctaaacgtccggaccgctttctggcattcgcagcactgccgctgcaggatccggacgcagctaccgaagaactgcaacgttgtgtccggaccctgggcttcgtgggtgccctggttaatggctttagccaggaaggcgatggtcaaaccccgctgtattacgacctgccgcagtatcgcccgttctggggtgaagtcgaaaaactggatgtgccgttttatctgcatccgcgtaacccgctgccgcaggattcccgtatctacgacggtcacccgtggctgctgggtccgacctgggcgttcgcccaagaaacggcggtgcatgccctgcgtctgatggcatctggcctgtttgatgaacacccgcgtctgaacattatcctgggtcatcttggcgaaggtctgccgtacatgatgtaccgtatcgatcatcgtatcgggtgggttaaagctccgccggattatccggcaaaacgtcgctttatggactacttcaacgaaaattttcacattaccacgtcaggcaacttccgtacccagacgctgattgatgcaatcctggaaattggtgctgatcgcatcctgttctcgaccgactggccgtttgaaaacattgatcatgccgctgcttggtttaatgctacgtctattgccgaagctgaccgtttgaaaatcggccgcaccaatgcccgtcgtctgttcaaactggatctgcgt

SEQ ID NO: 837 - DNA, 984 bp, Artificial Sequence
  synthetic construct; Dicamba decarboxylase variant
atggctcaaggcaaagtggcactggaagaacatttcgcaatcccggaaacgctgcaagacgccgcaggtttcgtcccgggcgactactggaaagaactgcagcatcgtctgctggatatccaagacactcgcctgaaactgatggataaacacgagatcggtacgatgattctgtccctggctgcaccggctgttcaggcgattccggaccgtcgcaaagccattgaaatcgcacgtcgcgctaatgatttcctggcagaagaagttgctaaacgtccggaccgctttctggcattcgcagcactgccgctgcaggatccggacgcagctaccgaagaactgcaacgttgtgtcaacgatctgggcttcgtgggtgccatggttaatggctttagcgttgaaggcgatggtcaaaccccgctgtattacgacctgccgcagtatcgcccgttctggggtgaagtcgaaaaactggatgtgccgttttatctgcatccgcgtaacccgctgccgcaggattcccgtatctacgacggtcacccgtggctgctgggtccgacctgggcgttcgcccaagaaacggcggtgcatgccctgcgtctgatggcatctggcctgtttgatgaacacccgggactgaacattatcctgggtcatcttggcgaaggtctgccgtacatgatgtaccgtatcgatcatcgtatcgggtgggttaaagctccgccggattatgcggcaaaacgtcgctttatggactacttcaacgaaaattttcacattaccacgtcaggcaacttccgtacccagacgctgattgatgcaatcctggaaattggtgctgatcgcatcctgttctcgaccgactggccgtttgaaaacattgatcatgccgctgcttggtttaatgctacgtctattgccgaagctgaccgtgtcaaaatcggccgcaccaatgcccgtcgtctgttcaaactggatctgcgt

SEQ ID NO: 838 - DNA, 984 bp, Artificial Sequence
  synthetic construct; Dicamba decarboxylase variant
atggctcaaggcaaagtggcactggaagaacatttcgcaatcccggaaacgctgcaagacgccgcaggtttcgtcccgggcgactactggaaagaactgcagcatcgtctgctggatatccaagacactcgcctgaaactgatggataaacacgagatcggtacgatgattctgtccctggctgcaccggctgttcaggctattcctgaccgtgttaaggccatcgaaatcgcacgtcgcgctaatgatttcctggcagaagaagttgctaaacgtccggaccgctttctggcattcgcagcactgccgctgcaggatccggacgcagctaccgaagaactgcaacgttgtgtcaacgatctgggcttcgtgggtgccatggttaatggctttagccaggaaggcgatggtcaaaccccgctgtattacgacctgccgcagtatcgcccgttctggggtgaagtcgaaaaactggatgtgccgttttatctgcatccgcgtaacccgctgccgcaggattcccgtatctacgacggtcacccgtggctgctgggtccgacctgggcgttcgcccaagaaacggcggtgcatgccctgcgtctgatggcatctggcctgtttgatgaacacccgggactgaacattatcctgggtcatatgggcgaaggtctgccgtacatgatgtaccgtatcgatcatcgtatcgcatgggttaaagctccgccggattatgcggcaaaacgtcgctttatggactacttcaacgaaaattttcacattaccacgtcaggcaacttccgtacccagacgctgattgatgcaatcctggaaattggtgctgatcgcatcctgttctcgaccgactggccgtttgaaaacattgatcatgccgctgcttggtttaatgctacgtctattgccgaagctgaccgtgtcaaaatcggccgcaccaatgcccgtcgtctgttcaaactggatctgcgt

SEQ ID NO: 839 - DNA, 984 bp, Artificial Sequence
  synthetic construct; Dicamba decarboxylase variant
atggctcaaggcaaagtggcactggaagaacatttcgcaatcccggaaacgctgcaagacgccgcaggtttcgtcccgggcgactactggaaagaactgcagcatcgtctgctggatatccaagacactcgcctgaaactgatggataaacacgagatcgaaacgatgattctgtccctggctgcaccggctgttcaggcgattccggaccgtcgcaaggccatcgaaatcgcacgtcgcgctaatgatttcctggcagaagaagttgctaaacgtccggaccgctttctggcattcgcagcactgccgttgcaggatgtggacgcagctactgaagaactgcaacgttgtgtcaacgatctgggcttcgtgggtgccctggttaatggctttagcgttgaaggcgatggtcaaaccccgctgtattacgacctgccgcagtatcgcccgttctggaaagaagtcgaaaaactggatgtgccgttttatctgcatccgcgtaacccgctgccgcaggattcccgtatctacgacggtcacccgtggctgctgggtccgacctgggcgttcgcccaagaaacggcggtgcatgccctgcgtctgatggcatctggcctgtttgatgaacacccgcgtctgaacattatcctgggtcatcttggcgaaggtctgccgtacatgatgtaccgtatcgatcatcgtatcgggtgggttaaagctccgccggattatccggcaaaacgtcgctttatggactacttcaacgaaaattttcacattaccacgtcaggcaacttccgtacccagacgctgattgatgcaatcctggaaattggtgctgatcgcatcctgttctcgaccgactggccgtttgaaaacattgatcatgccgctgcttggtttaatgctacgtctattgccgaagctgaccgtttgaaaatcggccgcaccaatgcccgtcgtctgttcaaactggatctgagt

SEQ ID NO: 840 - DNA, 984 bp, Artificial Sequence
  synthetic construct; Dicamba decarboxylase variant
atggctcaaggcaaagtggcactggaagaacatttcgcaatcccggaaacgctgcaagacgccgcaggtttcgtcccgggcgactactggaaagaactgcagcatcgtctgctggatatccaagacactcgcctgaaactgatggataaacacgagatcgaaacgatgattctgtccctggctgcaccggctgttcaggcgattccggaccgtcgcaaagccattgaaatcgcacgtcgcgctaatgatttcctggcagaagaagttgctaaacgtccggaccgctttctggcattcgcagcactgccgctgcaggatccggacgcagctaccgaagaactgcaacgttgtgtcaacgatctgggcttcgtgggtgccctggttaatggctttagccaggaaggcgatggtcaaaccccgctgtattacgacctgccgcagtatcgcccgttctggggtgaagtcgaaaaactggatgtgccgttttatctgcatccgcgtaacccgctgccgcaggattcccgtatctacgacggtcacccgtggctgctgggtccgacctgggcgttcgcccaagaaacggcggtgcatgccctgcgtctgatggcatctggcctgtttgatgaacacccgggactgaacattatcctgggtcatatgggcgaaggtctgccgtacatgatgtaccgtatcgatcatcgtatcgcatgggttaaagctccgccggattatgcggcaaaacgtcgctttatggactacttcaacgaaaattttcacattaccacgtcaggcaacttccgtacccagacgctgattgatgcaatcctggaaattggtgctgatcgcatcctgttctcgaccgactggccgtttgaaaacattgatcatgccgctgactggtttaatgctacgtctattgccgaagctgaccgtttgaaaatcggccgcaccaatgcccgtcgtctgttcaaactggatctgcgt

SEQ ID NO: 841 - DNA, 984 bp, Artificial Sequence
  synthetic construct; Dicamba decarboxylase variant
atggctcaaggcaaagtggcactggaagaacatttcgcaatcccggaaacgctgcaagacgccgcaggtttcgtcccgggcgactactggaaagaactgcagcatcgtctgctggatatccaagacactcgcctgaaactgatggataaacacgagatcgaaacgatgattctgtccctggctgcaccggctgttcaggcgattccggaccgtcgcaaagccattgaaatcgcacgtcgcgctaatgatttcctggcagaagaagttgctaaacgtccggaccgctttctggcattcgcagcactgccgctgcaggatccggacgcagctaccgaagaactgcaacgttgtgtcaacgatctgggcttcgtgggtgccctggttaatggctttagccaggaaggcgatggtcaaaccccgctgtattacgacctgccgcagtatcgcccgttctggaaagaagtcgaaaaactggatgtgccgttttatctgcatccgcgtaacccgctgccgcaggattcccgtatctacgacggtcacccgtggctgctgggtccgacctgggcgttcgcccaagaaacggcggtgcatgccctgcgtctgatggcatctggcctgtttgatgaacacccgcgtctgaacattatcctgggtcatatgggcgaaggtctgccgtacatgatgtaccgtatcgatcatcgtatcgcatgggttaaagctccgccggattatgcggcaaaacgtcgctttatggactacttcaacgaaaattttcacattaccacgtcaggcaacttccgtacccagacgctgattgatgcaatcctggaaattggtgctgatcgcatcctgttctcgaccgactggccgtttgaaaacattgatcatgccgctgcttggtttaatgctacgtctattgccgaagctgaccgtgtcaaaatcggccgcaccaatgcccgtcgtctgttcaaactggatctgcgt

SEQ ID NO: 842 - DNA, 984 bp, Artificial Sequence
  synthetic construct; Dicamba decarboxylase variant
atggctcaaggcaaagtggcactggaagaacatttcgcaatcccggaaacgctgcaagacgccgcaggtttcgtcccgggcgactactggaaagaactgcagcatcgtctgctggatatccaagaccagcgcctgaagctgatggataaacacgagatcgaaacgatgattctgtccctggctgcaccggctgttcaggcgattccggaccgtcgcaaagccattgaaatcgcacgtcgcgctaatgatttcctggcagaagaagttgctaaacgtccggaccgctttctggcattcgcagcactgccgctgcaggatccggacgcagctaccgaagaactgcaacgttgtgtcaatgatctgggcttcgtgggtgccctggttaatggctttagccaggaaggcgatggtcaaaccccgctgtattacgacctgccgcagtatcgcccgttctggggtgaagtcgaaaaactggatgtgccgttttatctgcatccgcgtaacccgctgccgcaggattcccgtatctacgacggtcacccgtggctgctgggtccgacctgggcgttcgcccaagaaacggcggtgcatgccctgcgtctgatggcatctggcctgtttgatgaacacccgggactgaacattatcctgggtcatcttggcgaaggtctgccgtacatgatgtaccgtatcgatcatcgtatcgcatgggttaaagctccgccggattatgcggcaaaacgtcgctttatggactacttcaacgaaaattttcacattaccacgtcaggcaacttccgtacccagacgctgattgatgcaatcctggaaattggtgctgatcgcatcctgttctcgaccgactggccgtttgaaaacattgatcatgccgctgactggtttaatgctacgtctattgccgaagctgaccgtgtcaaaatcggccgcaccaatgcccgtcgtctgttcaaactggatctgcgt

SEQ ID NO: 843 - DNA, 984 bp, Artificial Sequence
  synthetic construct; Dicamba decarboxylase variant
atggctcaaggcaaagtggcactggaagaacatttcgcaatcccggaaacgctgcaagacgccgcaggtttcgtcccgggcgactactggaaagaactgcagcatcgtctgctggatatccaagacactcgcctgaaactgatggataaacacgagatcgaaacgatgattctgtccctggctgcaccggctgttcaggcgattccggaccgtcgcaaagccattgaaatcgcacgtcgcgctaatgatttcctggcagaagaagttgctaaacgtccggaccgctttctggcattcgcagcgctgccgctgcaggatccggacgcagctaccgaagaactgcaacgttgtgtcaacgatctgggcttcgtgggtgccatggttaatggctttagcgttgaaggcgatggtcaaaccccgctgtattacgacctgccgcagtatcgcccgttctggggtgaagtcgaaaaactggatgtgccgttttatctgcatccgcgtaacccgctgccgcaggattcccgtatctacgacggtcacccgtggctgctgggtccgacctgggcgttcgcccaagaaacggcggtgcatgccctgcgtctgatggcatctggcctgtttgatgaacacccgggactgaacattatcctgggtcatatgggcgaaggtctgccgtacatgatgtaccgtatcgatcatcgtatcgcatgggttaaagctccgccggattatgcggcaaaacgtcgctttatggactacttcaacgaaaattttcacattaccacgtcaggcaacttccgtacccagacgctgattgatgcaatcctggaaattggtgctgatcgcatcctgttctcgaccgactggccgtttgaaaacattgatcatgccgctgcttggtttaatgctacgtctattgccgaagctgaccgtgtcaaaatcggccgcaccaatgcccgtcgtctgttcaaactggatctgcgt

SEQ ID NO: 844 - DNA, 984 bp, Artificial Sequence
  synthetic construct; Dicamba decarboxylase variant
atggctcaaggcaaagtggcactggaagaacatttcgcaatcccggaaacgctgcaagacgccgcaggtttcgtcccgggcgactactggaaagaactgcagcatcgtctgctggatatccaagacactcgcctgaaactgatggataaacacgagatcgaaacgatgattctgtccctggctgcaccggctgttcaggcgattccggaccgtcgcaaagccattgaaatcgcacgtcgcgctaatgatttcctggcagaagaagttgctaaacgtccggaccgctttctggcattcgcagcactgccgctgcaggatccggacgcagctaccgaagaactgcaacgttgtgtcaacgatctgggcttcgtgggtgccatggttaatggctttagcgttgaaggcgatggtcaaaccccgctgtattacgacctgccgcagtatcgcccgttctggggtgaagtcgaaaaactggatgtgccgttttatctgcatccgcgtaacccgctgccgcaggattcccgtatctacgacggtcacccgtggctgctgggtccgacctgggcgttcgcccaagaaacggcggtgcatgccctgcgtctgatggcatctggcctgtttgatgaacacccgcgtctgaacattatcctgggtcatatgggcgaaggtctgccgtacatgatgtaccgtatcgatcatcgtatcgcatgggttaaagctccgccggattatgcggcaaaacgtcgctttatggactacttcaacgaaaattttcacattaccacgtcaggcaacttccgtacccagacgctgattgatgcaatcctggaaattggtgctgatcgcatcctgttctcgaccgactggccgtttgaaaacattgatcatgccgctgcttggtttaatgctacgtctattgccgaagctgaccgtttgaaaatcggccgcaccaatgcccgtcgtctgttcaaactggatctgcgt

SEQ ID NO: 845 - DNA, 984 bp, Artificial Sequence
  synthetic construct; Dicamba decarboxylase variant
atggctcaaggcaaagtggcactggaagaacatttcgcaatcccggaaacgctgcaagacgccgcaggtttcgtcccgggcgactactggaaagaactgcagcatcgtctgctggatatccaagacactcgcctgaaactgatggataaacacgagatcgaaacgatgattctgtccctggctgcaccggctgttcaggcgattccggaccgtcgcaaagccattgaaatcgcacgtcgcgctaatgatttcctggcagaagaagttgctaaacgtccggaccgctttctggcattcgcagcactgccgctgcaggatccggacgcagctactgaagaactgcaacgttgtgtcaacgatctgggcttcgtgggtgccatggttaatggctttagcgttgaaggcgatggtcaaaccccgctgtattacgacctgccgcagtatcgcccgttctggggtgaagtcgaaaaactggatgtgccgttttatctgcatccgcgtaacccgctgccgcaggattcccgtatctacgacggtcacccgtggctgctgggtccgacctgggcgttcgcccaagaaacggcggtgcatgccctgcgtctgatggcatctggcctgtttgatgaacacccgcgtctgaacattatcctgggtcatatgggcgaaggtctgccgtacatgatgtaccgtatcgatcatcgtatcgcatgggttaaagctccgccggattatgcggcaaaacgtcgctttatggactacttcaacgaaaattttcacattaccacgtcaggcaacttccgtacccagacgctgattgatgcaatcctggaaattggtgctgatcgcatcctgttctcgaccgactggccgtttgaaaacattgatcatgccgctgactggtttaatgctacgtctattgccgaagctgaccgtgtcaaaatcggccgcaccaatgcccgtcgtctgttcaaactggatctgcgt

SEQ ID NO: 846 - DNA, 984 bp, Artificial Sequence
  synthetic construct; Dicamba decarboxylase variant
atggctcaaggcaaagtggcactggaagaacatttcgcaatcccggaaacgctgcaagacgccgcaggtttcgtcccgggcgactactggaaagaactgcagcatcgtctgctggatatccaagacactcgcctgaaactgatggataaacacgagatcgaaacgatgattctgtccctggctgcaccggctgttcaggcgattccggaccgtcgcaaagccattgaaatcgcacgtcgcgctaatgatttcctggcagaagaagttgctaaacgtccggaccgctttctggcattcgcagcactgccgctgcaggatccggacgcagctaccgaagaactgcaacgttgtgtcaacgatctgggcttcgtgggtgccatggttaatggctttagccaggaaggcgatggtcaaaccccgctgtattacgacctgccgcagtatcgcccgttctggggtgaagtcgaaaaactggatgtgccgttttatctgcatccgcgtaaccccctgccgcaggattcccgtatctacgacggtcacccgtggctgctgggtccgacctgggcgttcgcccaagaaacggcggtgcatgccctgcgtctgatggcatctggcctgtttgatgaacacccgcgtctgaacattatcctgggtcatatgggcgaaggtctgccgtacatgatgtaccgtatcgatcatcgtatcgcatgggttaaagctccgccggattatgcggcaaaacgtcgctttatggactacttcaacgaaaattttcacattaccacgtcaggcaacttccgtacccagacgctgattgatgcaatcctggaaattggtgctgatcgcatcctgttctcgaccgactggccgtttgaaaacattgatcatgccgctgcttggtttaatgctacgtctattgccgaagctgaccgtgtcaaaatcggccgcaccaatgcccgtcgtctgttcaaactggatctgcgt

SEQ ID NO: 847 - DNA, 984 bp, Artificial Sequence
  synthetic construct; Dicamba decarboxylase variant
atggctcaaggcaaagtggcactggaagaacatttcgcaatcccggaaacgctgcaagacgccgcaggtttcgtcccgggcgactactggaaagaactgcagcatcgtctgctggatatccaagacactcgcctgaaactgatggataaacacgagatcgaaacgatgattctgtccctggctgcaccggctgttcaggcgattccggaccgtcgcaaagccattgaaatcgcacgtcgcgctaatgatttcctggcagaagaagttgctaaacgtccggaccgctttctggcattcgcagcactgccgctgcaggatccggacgcagctaccgaagaactgcaacgttgtgtcaacgatctgggcttcgtgggtgccatggttaatggctttagccaggaaggcgatggtcaaaccccgctgtattacgacctgccgcagtatcgcccgttctggggtgaagtcgaaaaactggatgtgccgttttatctgcatccgcgtaacccgctgccgcaggattcccgtatctacgacggtcacccgtggctgctgggtccgacctgggcgttcgcccaagaaacggcggtgcatgccctgcgtctgatggcatctggcctgtttgatgaacacccgcgtctgaacattatcctgggtcatcttggcgaaggtctgccgtacatgatgtaccgtatcgatcatcgtatcgcatgggttaaagctccgccggattatgcggcaaaacgtcgctttatggactacttcctggaaaattttcacattaccacgtcaggcaacttccgtacccagacgctgattgatgcaatcctggaaattggtgctgatcgcatcctgttctcgaccgactggccgtttgaaaacattgatcatgccgctgactggtttaatgctacgtctattgccgaagctgaccgtttgaaaatcggccgcaccaatgcccgtcgtctgttcaaactggatctgcgt

SEQ ID NO: 848 - DNA, 984 bp, Artificial Sequence
  synthetic construct; Dicamba decarboxylase variant
atggctcaaggcaaagtggcactggaagaacatttcgcaatcccggaaacgctgcaagacgccgcaggtttcgtcccgggcgactactggaaagaactgcagcatcgtctgctggatatccaagacactcgcctgaaactgatggataaacacgagatcgaaacgatgattctgtccctggctgcaccggctgttcaggcgattccggaccgtcgcaaggccatcgaaatcgcacgtcgcgctaatgatttcctggcagaagaagttgctaaacgtccggaccgctttctggcattcgcagcactgccgctgcaggatccggacgcagctaccgaagaactgcaacgttgtgtcaacgatctgggcttcgtgggtgccctggttaatggctttagccaggaaggcgatggtcaaaccccgctgtattacgacctgccgcagtatcgcccgttctggggtgaagtcgaaaaactggatgtgccgttttatctgcatccgcgtaacccgctgccgcaggattcccgtatctacgacggtcacccgtggctgctgggtccgacctgggcgttcgcccaagaaacggcggtgcatgccctgcgtctgatggcatctggcctgtttgatgaacacccgcgtctgaacattatcctgggtcatcttggcgaaggtctgccgtacatgatgtaccgtatcgatcatcgtatcgcatgggttaaagctccgccggattatgcggcaaaacgtcgctttatggactacttcaacgaaaattttcacattaccacgtcaggcaacttccgtacccagacgctgattgatgcaatcctggaaattggtgctgatcgcatcctgttctcgaccgactggccgtttgaaaacattgatcatgccgctgactggtttaatgctacgtctattgccgaagctgaccgtgtcaaaatcggccgcaccaatgcccgtcgtctgttcaaactggatctgcgt

SEQ ID NO: 849 - DNA, 984 bp, Artificial Sequence
  synthetic construct; Dicamba decarboxylase variant
atggctcaaggcaaagtggcactggaagaacatttcgcaatcccggaaacgctgcaagacgccgcaggtttcgtcccgggcgcctactggaaagaactgcagcatcgtctgctggatatccaagacactcgcctgaaactgatggataaacacgagatcgaaacgatgattctgtccctggctgcaccggctgttcaggcgattccggaccgtcgcaaagccattgaaatcgcacgtcgcgctaatgatttcctggcagaagaagttgctaaacgtccggaccgctttctggcattcgcagcactgccgctgcaggatccggacgcagctaccgaagaactgcaacgttgtgtcaacgatctgggcttcgtgggtgccctggttaatggctttagccaggaaggcgatggtcaaaccccgctgtattacgacctgccgcagtatcgcccgttctggggtgaagtcgaaaaactggatgtgccgttttatctgcatccgcgtaacccgctgccgcaggattcccgtatctacgacggtcacccgtggctgctgggtccgacctgggcgttcgcccaagaaacggcggtgcatgccctgcgtctgatggcatctggcctgtttgatgaacacccgcgtctgaacattatcctgggtcatatgggcgaaggtctgccgtacatgatgtaccgtatcgatcatcgtatcgcatgggttaaagctccgccggattatgcggcaaaacgtcgctttatggactacttcaacgaaaattttcacattaccacgtcaggcaacttccgtacccagacgctgattgatgcaatcctggaaattggtgctgatcgcatcctgttctcgaccgactggccgtttgaaaacattgatcatgccgctgcttggtttaatgctacgtctattgccgaagctgaccgtttgaaaatcggccgcaccaatgcccgtcgtctgttcaaactggatggccgt

SEQ ID NO: 850 - DNA, 984 bp, Artificial Sequence
  synthetic construct; Dicamba decarboxylase variant
atggctcaaggcaaagtggcactggaagaacatttcgcaatcccggaaacgctgcaagacgccgcaggtttcgtcccgggcgaatactggaaagaactgcagcatcgtctgctggatatccaagacactcgcctgaaactgatggataaacacgagatcgaaacgatgattctgtccctggctgcaccggctgttcaggcgattccggaccgtcgcaaggccatcgaaatcgcacgtcgcgctaatgatttcctggcagaagaagttgctaaacgtccggaccgctttctggcattcgcagcactgccgctgcaggatccggacgcagctaccgaagaactgcaacgtacggtcaatgatctgggcttcgtgggtgccatggttaatggctttagccaggaaggcgatggtcaaaccccgctgtattacgacctgccgcagtatcgcccgttctggggtgaagtcgaaaaactggatgtgccgttttatctgcatccgcgtaacccgctgccgcaggattcccgtatctacgacggtcacccgtggctgctgggtccgacctgggcgttcgcccaagaaacggcggtgcatgccctgcgtctgatggcatctggcctgtttgatgaacacccgcgtctgaacattatcctgggtcatatgggcgaaggtctgccgtacatgatgtaccgtatcgatcatcgtatcgggtgggttaaagctccgccggattatgcggcaaaacgtcgctttatggactacttcaacgaaaattttcacattaccacgtcaggcaacttccgtacccagacgctgattgatgcaatcctggaaattggtgctgatcgcatcctgttctcgaccgactggccgtttgaaaacattgatcatgccgctgactggtttaatgctacgtctattgccgaagctgaccgtgtcaaaatcggccgcaccaatgcccgtcgtctgttcaaactggatggccgt

SEQ ID NO: 851 - DNA, 984 bp, Artificial Sequence
  synthetic construct; Dicamba decarboxylase variant
atggctcaaggcaaagtggcactggaagaacatttcgcaatcccggaaacgctgcaagacgccgcaggtttcgtcccgggcgactactggaaagaactgcagcatcgtctgctggatatccaagacactcgcctgaaactgatggataaacacgagatcgaaacgatgattctgtccctggctgcaccggctgttcaggcgattccggaccgtcgcaaagccattgaaatcgcacgtcgcgctaatgatttcctggcagaagaagttgctaaacgtccggaccgctttctggcattcgcagcactgccgctgcaggatccggacgcagctaccgaagaactgcaacgttgtgtcaacgatctgggcttcgtgggtgccatggttaatggctttagccaggaaggcgatggtcaaaccccgctgtattacgacctgccgcagtatcgcccgttctggggtgaagtcgaaaaactggatgtgccgttttatctgcatccgcgtaacccgctgccgcaggattcccgtatctacgacggtcacccgtggctgctgggtccgacctgggcgttcgcccaagaaacggcggtgcatgccctgcgtctgatggcatctggcctgtttgatgaacacccgcgtctgaacattatcctgggtcatcttggcgaaggtctgccgtacatgatgtaccgtatcgatcatcgtatcgcatgggttaaagctccgccggattatgcggcaaaacgtcgctttatggactacttcaacgaaaattttcacattaccacgtcaggcaacttccgtacccagacgctgattgatgcaatcctggaaattggtgctgatcgcatcctgttctcgaccgactggccgtttgaaaacattgatcatgccgctgactggtttaatgctacgtctattgccgaagctgaccgtgtcaaaatcggccgcaccaatgcccgtcgtctgttcaaactggatctgcgt

SEQ ID NO: 852 - DNA, 984 bp, Artificial Sequence
  synthetic construct; Dicamba decarboxylase variant
atggctcaaggcaaagtggcactggaagaacatttcgcaatcccggaaacgctgcaagacgccgcaggtttcgtcccgggcgactactggaaagaactgcagcatcgtctgctggatatccaagacactcgcctgaaactgatggataaacacgagatcgaaacgatgattctgtccctggctgcaccggctgttcaggcgattccggaccgtcgcaaagccattgaaatcgcacgtcgcgctaatgatttcctggcagaagaagttgctaaacgtccggaccgctttctggcattcgcagcactgccgatgcaggatcccgacgcagctactgaagaactgcaacgttgtgtccgggatctgggcttcgtgggtgccctggttaatggctttagccaggaaggcgatggtcaaaccccgctgtattacgacctgccgcagtatcgcccgttctggggtgaagtcgaaaaactggatgtgccgttttatctgcatccgcgtaacccgctgccgcaggattcccgtatctacgacggtcacccgtggctgctgggtccgacctgggcgttcgcccaagaaacggcggtgcatgccctgcgtctgatggcatctggcctgtttgatgaacacccgcgtctgaacattatcctgggtcatatgggcgaaggtctgccgtacatgatgtaccgtatcgatcatcgtatcgggtgggttaaagctccgccggattatgcggcaaaacgtcgctttatggactacttcaacgaaaattttcacattaccacgtcaggcaacttccgtacccagacgctgattgatgcaatcctggaaattggtgctgatcgcatcctgttctcgaccgactggccgtttgaaaacattgatcatgccgctgactggtttaatgctacgtctattgccgaagctgaccgtttgaaaatcggccgcaccaatgcccgtcgtctgttcaaactggatctgcgt

SEQ ID NO: 853 - DNA, 984 bp, Artificial Sequence
  synthetic construct; Dicamba decarboxylase variant
atggctcaaggcaaagtggcactggaagaacatttcgcaatcccggaaacgctgcaagacgccgcaggtttcgtcccgggcgactactggaaagaactgcagcatcgtctgctggatatccaagacactcgcctgaaactgatggataaacacgagatcgaaacgatgattctgtccctggctgcaccggctgttcaggcgattccggaccgtcgcaaagccattgaaatcgcacgtcgcgctaatgatttcctggcagaagaagttgctaaacgtccggaccgctttctggcattcgcagcactgccgctgcaggatccggacgcagctaccgaagaactgcaacgttgtgtcaacgatctgggcttcgtgggtgccatggttaatggctttagcgttgaaggcgatggtcaaaccccgctgtattacgacctgccgcagtatcgcccgttctggggtgaagtcgaaaaactggatgtgccgttttatctgcatccgcgtaacccgctgccgcaggattcccgtatctacgacggtcacccgtggctgctgggtccgacctgggcgttcgcccaagaaacggcggtgcatgccctgcgtctgatggcatctggcctgtttgatgaacacccgcgtctgaacattatcctgggtcatatgggcgaaggtctgccgtacatgatgtaccgtatcgatcatcgtatcgggtgggttaaagctccgccggattatgcggcaaaacgtcgctttatggactacttcaacgaaaattttcacattaccacgtcaggcaacttccgtacccagacgctgattgatgcaatcctggaaattggtgctgatcgcatcctgttctcgaccgactggccgtttgaaaacattgatcatgccgctgactggtttaatgctacgtctattgccgaagctgaccgtgtcaaaatcggccgcaccaatgcccgtcgtctgttcaaactggatggccgt

SEQ ID NO: 854 - DNA, 984 bp, Artificial Sequence
  synthetic construct; Dicamba decarboxylase variant
atggctcaaggcaaagtggcactggaagaacatttcgcaatcccggaaacgctgcaagacgccgcaggtttcgtcccgggcgactactggaaagaactgcagcatcgtctgctggatatccaagacactcgcctgaaactgatggataaacacgagatcgaaacgatgattctgtccctggctgcaccggctgttcaggcgattccggaccgtcgcaaagccattgaaatcgcacgtcgcgctaatgatttcctggcagaagaagttgctaaacgtccggaccgctttctggcattcgcagcactgccgctgcaggatccggacgcagctaccgaagaactgcaacgtacggtcaatgatctgggcttcgtgggtgccatggttaatggctttagcgttgaaggcgatggtcaaaccccgctgtattacgacctgccgcagtatcgcccgttctggggtgaagtcgaaaaactggatgtgccgttttatctgcatccgcgtaacccgctgccgcaggattcccgtatctacgacggtcacccgtggctgctgggtccgacctgggcgttcgcccaagaaacggcggtgcatgccctgcgtctgatggcatctggcctgtttgatgaacacccgcgtctgaacattatcctgggtcatcttggcgaaggtctgccgtacatgatgtaccgtatcgatcatcgtatcgcatgggttaaagctccgccggattatgcggcaaaacgtcgctttatggactacttcaacgaaaattttcacattaccacgtcaggcaacttccgtacccagacgctgattgatgcaatcctggaaattggtgctgatcgcatcctgttctcgaccgactggccgtttgaaaacattgatcatgccgctgactggtttaatgctacgtctattgccgaagctgaccgtttgaaaatcggccgcaccaatgcccgtcgtctgttcaaactggatctgcgt

SEQ ID NO: 855 - DNA, 984 bp, Artificial Sequence
  synthetic construct; Dicamba decarboxylase variant
atggctcaaggcaaagtggcactggaagaacatttcgcaatcccggaaacgctgcaagacgccgcaggtttcgtcccgggcgactactggaaagaactgcagcatcgtctgctggatatccaagacactcgcctgaaactgatggataaacacgagatcgaaacgatgattctgtccctggctgcaccggctgttcaggcgattccggaccgtcgcaaagccattgaaatcgcacgtcgcgctaatgatttcctggcagaagaagttgctaaacgtccggaccgctttctggcattcgcagcactgccgctgcaggatccggacgcagctaccgaagaactgcaacgttgtgtcaacgatctgggcttcgtgggtgccctggttaatggctttagccaggaaggcgatggtcaaaccccgctgtattacgacctgccgcagtatcgcccgttctggggtgaagtcgaaaaactggatgtgccgttttatctgcatccgcgtaacccgctgccgcaggattcccgtatctacgacggtcacccgtggctgctgggtccgacctgggcgttcgcccaagaaacggcggtgcatgccctgcgtctgatggcatctggcctgtttgatgaacacccgcgtctgaacattatcctgggtcatatgggcgaaggtctgccgtacatgatgtaccgtatcgatcatcgtatcgcatgggttaaagctccgccggattatgcggcaaaacgtcgctttatggactacttcaacgaaaattttcacattaccacgtcaggcaacttccgtacccagacgctgattgatgcaatcctggaaattggtgctgatcgcatcctgttctcgaccgactggccgtttgaaaacattgatcatgccgctgactggtttaatgctacgtctattgccgaagctgaccgtttgaaaatcggccgcaccaatgcccgtcgtctgttcaaactggatctgcgt

SEQ ID NO: 856 - DNA, 984 bp, Artificial Sequence
  synthetic construct; Dicamba decarboxylase variant
atggctcaaggcaaagtggcactggaagaacatttcgcaatcccggaaacgctgcaagacgccgcaggtttcgtcccgggcgactactggaaagaactgcagcatcgtctgctggatatccaagacactcgcctgaaactgatggataaacacgagatcgaaacgatgattctgtccctggctgcaccggctgttcaggcgattccggaccgtcgcaaagccattgaaatcgcacgtcgcgctaatgatttcctggcagaagaagttgctaaacgtccggaccgctttctggcattcgcagcactgccgctgcaggatccggacgcagctaccgaagaactgcaacgtacggtcaatgatctgggcttcgtgggtgccctggttaatggctttagccaggaaggcgatggtcaaaccccgctgtattacgacctgccgcagtatcgcccgttctggggtgaagtcgaaaaactggatgtgccgttttatctgcatccgcgtaacccgctgccgcaggattcccgtatctacgacggtcacccgtggctgctgggtccgacctgggcgttcgcccaagaaacggcggtgcatgccctgcgtctgatggcatctggcctgtttgatgaacacccgcgtctgaacattatcctgggtcatcttggcgaaggtctgccgtacatgatgtaccgtatcgatcatcgtatcgcatgggttaaagctccgccggattatgcggcaaaacgtcgctttatggactacttcaacgaaaattttcacattaccacgtcaggcaacttccgtacccaggcgctgattgatgcaatcctggaaattggtgctgatcgcatcctgttctcgaccgactggccgtttgaaaacattgatcatgccgctgcttggtttaatgctacgtctatcgccgaagctgaccgtgtcaaaatcggccgcaccaatgcccgtcgtctgttcaaactggatctgcgt

SEQ ID NO: 857 - DNA, 984 bp, Artificial Sequence
  synthetic construct; Dicamba decarboxylase variant
atggctcaaggcaaagtggcactggaagaacatttcgcaatcccggaaacgctgcaagacgccgcaggtttcgtcccgggcgactactggaaagaactgcagcatcgtctgctggatatccaagacacgcgcctgaagctgatggataaacacgagatcgaaacgatgattctgtccctggctgcaccggctgttcaggcgattccggaccgtcgcaaagccattgaaatcgcacgtcgcgctaatgatttcctggcagaagaagttgctaaacgtccggaccgctttctggcattcgcagcactgccgctgcaggatccggacgcagctaccgaagaactgcaacgttgtgtcaacgatctgggcttcgtgggtgccatggttaatggctttagcgttgaaggcgatggtcaaaccccgctgtattacgacctgccgcagtatcgcccgttctggggtgaagtcgaaaaactggatgtgccgttttatctgcatccgcgtaacccgctgccgcaggattcccgtatctacgacggtcacccgtggctgctgggtccgacctgggcgttcgcccaagaaacggcggtgcatgccctgcgtctgatggcatctggcctgtttgatgaacacccgcgtctgaacattatcctgggtcatatgggcgaaggtctgccgtacatgatgtaccgtatcgatcatcgtatcgcatgggttaaagctccgccggattatgcggcaaaacgtcgctttatggactacttcaacgaaaattttcacattaccacgtcaggcaacttccgtacccagacgctgattgatgcaatcctggaaattggtgctgatcgcatcctgttctcgaccgactggccgtttgaaaacattgatcatgccgctgactggtttaatgctacgtctattgccgaagctgaccgtttgaaaatcggccgcaccaatgcccgtcgtctgttcaaactggatggccgt

SEQ ID NO: 858 - DNA, 984 bp, Artificial Sequence
  synthetic construct; Dicamba decarboxylase variant
atggctcaaggcaaagtggcactggaagaacatttcgcaatcccggaaacgctgcaagacgccgcaggtttcgtcccgggcgactactggaaagaactgcagcatcgtctgctggatatccaagacacgcgcctgaagctgatggataaacacgagatcgaaacgatgattctgtccctggctgcaccggctgttcaggcgattccggaccgtcgcaaagccattgaaatcgcacgtcgcgctaatgatttcctggcagaagaagttgctaaacgtccggaccgctttctggcattcgcagcactgccgctgcaggatccggacgcagctaccgaagaactgcaacgtacggtcaatgatctgggcttcgtgggtgccatggttaatggctttagccaggaaggcgatggtcaaaccccgctgtattacgacctgccgcagtatcgcccgttctggggtgaagtcgaaaaactggatgtgccgttttatctgcatccgcgtaacccgctgccgcaggattcccgtatctacgacggtcacccgtggctgctgggtccgacctgggcgttcgcccaagaaacggcggtgcatgccctgcgtctgatggcatctggcctgtttgatgaacacccgcgtctgaacattatcctgggtcatcttggcgaaggtctgccgtacatgatgtaccgtatcgatcatcgtatcgggtgggttaaagctccgccggattatccggcaaaacgtcgctttatggactacttcaacgaaaattttcacattaccacgtcaggcaacttccgtacccagacgctgattgatgcaatcctggaaattggtgctgatcgcatcctgttctcgaccgactggccgtttgaaaacattgatcatgccgctgcttggtttaatgctacgtctattgccgaagctgaccgtgtcaaaatcggccgcaccaatgcccgtcgtctgttcaaactggatctgcgt

SEQ ID NO: 859 - DNA, 984 bp, Artificial Sequence
  synthetic construct; Dicamba decarboxylase variant
atggctcaaggcaaagtggcactggaagaacatttcgcaatcccggaaacgctgcaagacgccgcaggtttcgtcccgggcgactactggaaagaactgcagcatcgtctgctggatatccaagacactcgcctgaaactgatggataaacacgagatcgaaacgatgattctgtccctggctgcaccggctgttcaggcgattccggaccgtcgcaaagccattgaaatcgcacgtcgcgctaatgatttcctggcagaagaagttgctaaacgtccggaccgctttctggcattcgcagcactgccgctgcaggatccggacgcagctaccgaagaactgcaacgttgtgtcaacgatctgggcttcgtgggtgccatggttaatggctttagccaggaaggcgatggtcaaaccccgctgtattacgacctgccgcagtatcgcccgttctggggtgaagtcgaaaaactggatgtgccgttttatctgcatccgcgtaacccgctgccgcaggattcccgtatctacgacggtcacccgtggctgctgggtccgacctgggcgttcgcccaagaaacggcggtgcatgccctgcgtctgatggcatctggcctgtttgatgaacacccgcgtctgaacattatcctgggtcatatgggcgaaggtctgccgtacatgatgtaccgtatcgatcatcgtatcgcatgggttaaagctccgccggattatgcggcaaaacgtcgctttatggactacttcaacgaaaattttcacattaccacgtcaggcaacttccgtacccagacgctgattgatgcaatcctggaaattggtgctgatcgcatcctgttctcgaccgactggccgtttgaaaacattgatcatgccgctgactggtttaatgctacgtctattgccgaagctgaccgtgtcaaaatcggccgcaccaatgcccgtcgtctgttcaaactggatctgcgt

SEQ ID NO: 860 - DNA, 984 bp, Artificial Sequence
  synthetic construct; Dicamba decarboxylase variant
atggctcaaggcaaagtggcactggaagaacatttcgcaatcccggaaacgctgcaagacgccgcaggtttcgtcccgggcgactactggaaagaactgcagcatcgtctgctggatatccaagaccagcgcctgaagctgatggataaacacgagatcgaaacgatgattctgtccctggctgcaccggctgttcaggcgattccggaccgtcgcaaagccattgaaatcgcacgtcgcgctaatgatttcctggcagaagaagttgctaaacgtccggaccgctttctggcattcgcagcactgccgctgcaggatccggacgcagctaccgaagaactgcaacgttgtgtcaacgatctgggcttcgtgggtgccatggttaatggctttagccaggaaggcgatggtcaaaccccgctgtattacgacctgccgcagtatcgcccgttctggggtgaagtcgaaaaactggatgtgccgttttatctgcatccgcgtaacccgctgccgcaggattcccgtatctacgacggtcacccgtggctgctgggtccgacctgggcgttcgcccaagaaacggcggtgcatgccctgcgtctgatggcatctggcctgtttgatgaacacccgcgtctgaacattatcctgggtcatatgggcgaaggtctgccgtacatgatgtaccgtatcgatcatcgtatcgcatgggttaaagctccgccggattatgcggcaaaacgtcgctttatggactacttcaacgaaaattttcacattaccacgtcaggcaacttccgtacccagacgctgattgatgcaatcctggaaattggtgctgatcgcatcctgttctcgaccgactggccgtttgaaaacattgatcatgccgctgactggtttaatgctacgtctattgccgaagctgaccgtgtcaaaatcggccgcaccaatgcccgtcgtctgttcaaactggatggccgt

SEQ ID NO: 861 - DNA, 984 bp, Artificial Sequence
  synthetic construct; Dicamba decarboxylase variant
atggctcaaggcaaagtggcactggaagaacatttcgcaatcccggaaacgctgcaagacgccgcaggtttcgtcccgggcgactactggaaagaactgcagcatcgtctgctggatatccaagacacgcgcctgaagctgatggataaacacgagatcgaaacgatgattctgtccctggctgcaccggctgttcaggcgattccggaccgtcgcaaagccattgaaatcgcacgtcgcgctaatgatttcctggcagaagaagttgctaaacgtccggaccgctttctggcattcgcagcactgccgctgcaggatccggacgcagctaccgaagaactgcaacgttgtgtcaacgatctgggcttcgtgggtgccatggttaatggctttagccaggaaggcgatggtcaaaccccgctgtattacgacctgccgcagtatcgcccgttctggggtgaagtcgaaaaactggatgtgccgttttatctgcatccgcgtaacccgctgccgcaggattcccgtatctacgacggtcacccgtggctgctgggtccgacctgggcgttcgcccaagaaacggcggtgcatgccctgcgtctgatggcatctggcctgtttgatgaacacccgggactgaacattatcctgggtcatatgggcgaaggtctgccgtacatgatgtaccgtatcgatcatcgtatcgcatgggttaaagctccgccggattatccggcaaaacgtcgctttatggactacttcaacgaaaattttcacattaccacgtcaggcaacttccgtacccagacgctgattgatgcaatcctggaaattggtgctgatcgcatcctgttctcgaccgactggccgtttgaaaacattgatcatgccgctgcttggtttaatgctacgtctattgccgaagctgaccgtttgaaaatcggccgcaccaatgcccgtcgtctgttcaaactggatggccgt

SEQ ID NO: 862 - DNA, 984 bp, Artificial Sequence
  synthetic construct; Dicamba decarboxylase variant
atggctcaaggcaaagtggcactggaagaacatttcgcaatcccggaaacgctgcaagacgccgcaggtttcgtcccgggcgactactggaaagaactgcagcatcgtctgctggatatccaagacacgcgcctgaagctgatggataaacacgagatcggtacgatgattctgtccctggctgcaccggctgttcaggcgattccggaccgtcgcaaagccattgaaatcgcacgtcgcgctaatgatttcctggcagaagaagttgctaaacgtccggaccgctttctggcattcgcagcactgccgttgcaggatccggacgcagctaccgaagaactgcaacgttgtgtcaacgatctgggcttcgtgggtgccatggttaatggctttagcgttgaaggcgatggtcaaaccccgctgtattacgacctgccgcagtatcgcccgttctggggtgaagtcgaaaaactggatgtgccgttttatctgcatccgcgtaacccgctgccgcaggattcccgtatctacgacggtcacccgtggctgctgggtccgacctgggcgttcgcccaagaaacggcggtgcatgccctgcgtctgatggcatctggcctgtttgatgaacacccgcgtctgaacattatcctgggtcatatgggcgaaggtctgccgtacatgatgtaccgtatcgatcatcgtatcgcatgggttaaagctccgccggattatccggcaaaacgtcgctttatggactacttcaacgaaaattttcacattaccacgtcaggcaacttccgtacccagacgctgattgatgcaatcctggaaattggtgctgatcgcatcctgttctcgaccgactggccgtttgaaaacattgatcatgccgctgcttggtttaatgctacgcctattgccgaagctgaccgtgtcaaaatcggccgcaccaatgcccgtcgtctgttcaaactggatggccgt

SEQ ID NO: 863 - DNA, 984 bp, Artificial Sequence
  synthetic construct; Dicamba decarboxylase variant
atggctcaaggcaaagtggcactggaagaacatttcgcaatcccggaaacgctgaatgacgccgcaggcttcgtcccgagcgaatactggaaagaactgcagcatcgtctgctggatatccaagacactcgcctgaaactgatggataaacacgagatcggtacgatgattctgtccctggctgcaccggctgttcaggcgattccggaccgtcgcaaagccattgaaatcgcacgtcgcgctaatgatttcctggcagaagaagttgctaaacgtccggaccgctttctggcattcgcagcactgccgctgcaggatccggacgcagctaccgaagaactgcaacgttgtgtcaacgatctgggcttcgtgggtgccatggttaatggctttagccaggaaggcgatggtcaaaccccgctgtattacgacctgccgcagtatcgcccgttctggggtgaagtcgaaaaactggatgtgccgttttatctgcatccgcgtaacccgctgccgcaggattcccgtatctacgacggtcacccgtggctgctgggtccgacctgggcgttcgcccaagaaacggcggtgcatgccctgcgtctgatggcatctggcctgtttgatgaacacccgcgtctgaacattatcctgggtcatatgggcgaaggtctgccgtacatgatgtaccgtatcgatcatcgtatcgcatgggttaaagctccgccggattatccggcaaaacgtcgctttatggactacttcaacgaaaattttcacattaccacgtcaggcaacttccgtgcccagacgctgattgatgcaatcctggaaattggtgctgatcgcatcctgttctcgaccgactggccgtttgaaaacattgatcatgccgctgactggtttaatgctacgtctattgccgaagctgaccgtttgaaaatcggccgcaccaatgcccgtcgtctgttcaaactggatggccgt

SEQ ID NO: 864 - DNA, 984 bp, Artificial Sequence
  synthetic construct; Dicamba decarboxylase variant
atggctcaaggcaaagtggcactggaagaacatttcgcaatcccggaaacgctgcaagacgccgcaggtttcgtcccgggcgactactggaaagaactgcagcatcgtctgctggatatccaagacactcgcctgaaactgatggataaacacgagatcgaaacgatgattctatccctggctgcaccggctgttcaggcgattccggaccgtcgcaaagccattgaaatcgcacgtcgcgctaatgatttcctggcagaagaagttgctaaacgtccggaccgctttctggcattcgcagcactgccgctgcaggatccggacgcagctaccgaagaactgcaacgttgtgtcaacgatctgggcttcgtgggtgccatggttaatggctttagccaggaaggcgatggtcaaaccccgctgtattacgacctgccgcagtatcgcccgttctggaaagaagtcgaaaaactggatgtgccgttttatctgcatccgcgtaacccgctgccgcaggattcccgtatctacgacggtcacccgtggctgctgggtccgacctgggcgttcgcccaagaaacggcggtgcatgccctgcgtctgatggcatctggcctgtttgatgaacacccgcgtctgaacattatcctgggtcatcttggcgaaggtctgccgtacatgatgtaccgtatcgatcatcgtatcgcatgggttaaagctccgccggattatgcggcaaaacgtcgctttatggactacttcaacgaaaattttcacattaccacgtcaggcaacttccgtacccagacgctgattgatgcaatcctggaaattggtgctgatcgcatcctgttctcgaccgactggccgtttgaaaacattgatcatgccgctgcttggtttaatgctacgtctattgccgaagctgaccgtgtcaaaatcggccgcaccaatgcccgtcgtctgttcaaactggatggccgt

SEQ ID NO: 865 - DNA, 984 bp, Artificial Sequence
  synthetic construct; Dicamba decarboxylase variant
atggctcaaggcaaagtggcactggaagaacatttcgcaatcccggaaacgctgcaagacgccgcaggtttcgtcccgggcgactactggaaagaactgcagcatcgtctgctggatatccaagacactcgcctgaaactgatggataaacacgagatcgaaacgatgattctgtccctggctgcaccggctgttcaggcgattccggaccgtcgcaaagccattgaaatcgcacgtcgcgctaatgatttcctggcagaagaagttgctaaacgtccggaccgctttctggcattcgcagcactgccgctgcaggatccggacgcagctaccgaagaactgcaacgttgtgtcaacgatctgggcttcgtgggtgccatggttaatggctttagccaggaaggcgatggtcaaaccccgctgtattacgacctgccgcagtatcgcccgttctggggtgaagtcgaaaaactggatgtgccgttttatctgcatccgcgtaacccgctgccgcaggattcccgtatctacgacggtcacccgtggctgctgggtccgacctgggcgttcgcccaagaaacggcggtgcatgccctgcgtctgatggcatctggcctgtttgatgaacacccgcgtctgaacattatcctgggtcatatgggcgaaggtctgccgtacatgatgtaccgtatcgatcatcgtatcgcatgggttaaagctccgccggattatgcggcaaaacgtcgctttatggactacttcaacgaaaattttcacattaccacgtcaggcaacttccgtacccagacgctgattgatgcaatcctggaaattggtgctgatcgcatcctgttctcgaccgactggccgtttgaaaacattgatcatgccgctgactggtttaatgctacgtctattgccgaagctgaccgtgtcaaaatcggccgcaccaatgcccgtcgtctgttcaaactggatggccgt

SEQ ID NO: 866 - DNA, 984 bp, Artificial Sequence
  synthetic construct; Dicamba decarboxylase variant
atggctcaaggcaaagtggcactggaagaacatttcgcaatcccggaaacgctgcaagacgccgcaggtttcgtcccgggcgactactggaaagaactgcagcatcgtctgctggatatccaagacacgcgcctgaagctgatggataaacacgagatcgaaacgatgattctgtccctggctgcaccggctgttcaggcgattccggaccgtcgcaaagccattgaaatcgcacgtcgcgctaatgatttcctggcagaagaagttgctaaacgtccggaccgctttctggcattcgcagcactgccgctgcaggatccggacgcagctaccgaagaactgcaacgttgtgtccgggatctgggcttcgtgggtgccatggttaatggctttagcgttgaaggcgatggtcaaaccccgctgtattacgacctgccgcagtatcgcccgttctggaaagaagtcgaaaaactggatgtgccgttttatctgcatccgcgtaacccgctgccgcaggattcccgtatctacgacggtcacccgtggctgctgggtccgacctgggcgttcgcccaagaaacggcggtgcatgccctgcgtctgatggcatctggcctgtttgatgaacacccgcgtctgaacattatcctgggtcatatgggcgaaggtctgccgtacatgatgtaccgtatcgatcatcgtatcgcatgggttaaagctccgccggattatgcggcaaaacgtcgctttatggactacttcaacgaaaattttcacattaccacgtcaggcaacttccgtacccagacgctgattgatgcaatcctggaaattggtgctgatcgcatcctgttctcgaccgactggccgtttgaaaacattgatcatgccgctgcttggtttaatgctacgtctattgccgaagctgaccgtgtcaaaatcggccgcaccaatgcccgtcgtctgttcaaactggatctgcgt

SEQ ID NO: 867 - DNA, 984 bp, Artificial Sequence
  synthetic construct; Dicamba decarboxylase variant
atggctcaaggcaaagtggcactggaagaacatttcgcaatcccggaaacgctgcaagacgccgcaggtttcgtcccgggcgactactggaaagaactgcagcatcgtctgctggatatccaagacacgcgcctgcggctgatggataaacacgagatcgaaacgatgattctgtccctggctgcaccggctgttcaggcgattccggaccgtcgcaaagccattgaaatcgcacgtcgcgctaatgatttcctggcagaagaagttgctaaacgtccggaccgctttctggcattcgcagcactgccgctgcaggatccggacgcagctaccgaagaactgcaacgttgtgtccgggatctgggcttcgtgggtgccatggttaatggctttagccaggaaggcgatggtcaaaccccgctgtattacgacctgccgcagtatcgcccgttctggggtgaagtcgaaaaactggatgtgccgttttatctgcatccgcgtaacccgctgccgcaggattcccgtatctacgacggtcacccgtggctgctgggtccgacctgggcgttcgcccaagaaacggcggtgcatgccctgcgtctgatggcatctggcctgtttgatgaacacccgcgtctgaacattatcctgggtcatatgggcgaaggtctgccgtacatgatgtaccgtatcgatcatcgtatcgcatgggttaaagctccgccggattatgcggcaaaacgtcgctttatggactacttcaacgaaaattttcacattaccacgtcaggcaacttccgtacccagacgctgattgatgcaatcctggaaattggtgctgatcgcatcctgttctcgaccgactggccgtttgaaaacattgatcatgccgctgactggtttaatgctacgtctattgccgaagctgaccgtgtcaaaatcggccgcaccaatgcccgtcgtctgttcaaactggatctgcgt

SEQ ID NO: 868 - DNA, 984 bp, Artificial Sequence
  synthetic construct; Dicamba decarboxylase variant
atggctcaaggcaaagtggcactggaagaacatttcgcaatcccggaaacgctgcaagacgccgcgggtttcgtcccgggcgactactggaaagaactgcagcatcgtctgctggatatccaagacactcgcctgaagctgatggataaacacgagatcgaaacgatgattctgtccctggctgcaccggctgttcaggcgattccggaccgtcgcaaagccactgaaatcgcacgtcgcgctaatgatttcctggcagaagaagttgctaaacgtccggaccgctttctggcattcgcagcactgccgctgcaggatccggacgcagctaccgaagaactgcaacgttgtgtcaacgatctgggcttcgtgggtgccctggttaatggctttagccaggaaggcgatggtcaaaccccgctgtattacgacctgccgcagtatcgcccgttctggggtgaagtcgaaaaactggatgtgccgttttatctgcatccgcgtaacccgctgccgcaggattcccgtatctacgacggtcacccgtggctgctgggtccgacctgggcgttcgcccaagaaacggcggtgcatgccctgcgtctgatggcatctggcctgtttgatgaacacccgcgtctgaacattatcctgggtcatcttggcgaaggtctgccgtacatgatgtaccgtatcgatcatcgtatcgcatgggttaaagctccgccggattatgcggcaaaacgtcgctttatggactacttcaacgaaaattttcacattaccacgtcaggcaacttccgtacccagacgctgattgatgcaatcctggaaattggtgctgatcgcatcctgttctcgaccgactggccgtttgaaaacattgatcatgccgctgactggtttaatgctacgtctattgccgaagctgaccgtgtcaaaatcggccgcaccaatgcccgtcgtctgttcaaactggatctgcgt

SEQ ID NO: 869 - DNA, 984 bp, Artificial Sequence
  synthetic construct; Dicamba decarboxylase variant
atggctcaaggcaaagtggcactggaagaacatttcgcaatcccggaaacgctgaatgacgccgcaggtttcgtcccgggcgactactggaaagaactgcagcatcgtctgctggatatccaagacacgcgcctgaagctgatggataaacacgagatcgaaacgatgattctgtccctggctgcaccggctgttcaggcgattccggaccgtcgcaaagccattgaaatcgcacgtcgcgctaatgatttcctggcagaagaagttgctaaacgtccggaccgctttctggcattcgcagcactgccgatgcaggatccggacgcagctaccgaagaactgcaacgttgtgtccgggatctgggcttcgtgggtgccctggttaatggctttagccaggaaggcgatggtcaaaccccgctgtattacgacctgccgcagtatcgcccgttctggggtgaagtcgaaaaactggatgtgccgttttatctgcatccgcgtaacccgctgccgcaggattcccgtatctacgacggtcacccgtggctgctgggtccgacctgggcgttcgcccaagaaacggcggtgcatgccctgcgtctgatggcatctggcctgtttgatgaacacccgggactgaacattatcctgggtcatatgggcgaaggtctgccgtacatgatgtaccgtatcgatcatcgtatcgggtgggttaaagctccgccggattatccggcaaaacgtcgctttatggactacttcctggaaaattttcacattaccacgtcaggcaacttccgtacccagacgctgattgatgcaatcctggaaattggtgctgatcgcatcctgttctcgaccgactggccgtttgaaaacattgatcatgccgctgcttggtttaatgctacgtctattgccgaagctgaccgtttgaaaatcggccgcaccaatgcccgtcgtctgttcaaactggatctgcgt

SEQ ID NO: 870 - DNA, 984 bp, Artificial Sequence
  synthetic construct; Dicamba decarboxylase variant
atggctcaaggcaaagtggcactggaagaacatttcgcaatcccggaaacgctgcaagacgccgcaggtttcgtcccgggcgactactggaaagaactgcagcatcgtctgctggatatccaagacactcgcctgaaactgatggataaacacgagatcgaaacgatgattctgtccctggctgcaccggctgttcaggcgattccggaccgtcgcaaagccattgaaatcgcacgtcgcgctaatgatttcctggcagaagaagttgctaaacgtccggaccgctttctggcattcgcagcactgccgctgcaggatccggacgcagctaccgaagaactgcaacgttgtgtcaacgatctgggcttcgtgggtgccctggttaatggctttagccaggaaggcgatggtcaaaccccgctgtattacgacctgccgcagtatcgcccgttctggggtgaagtcgaaaaactggatgtgccgttttatctgcatccgcgtaacccgctgccgcaggattcccgtatctacgacggtcacccgtggctgctgggtccgacctgggcgttcgcccaagaaacggcggtgcatgccctgcgtctgatggcatctggcctgtttgatgaacacccgcgtctgaacattatcctgggtcatatgggcgaaggtctgccgtacatgatgtaccgtatcgatcatcgtatcgcatgggttaaagctccgccggattatccggcaaaacgtcgctttatggactacttcaacgaaaattttcacattaccacgtcaggcaacttccgtacccagacgctgattgatgcaatcctggaaattggtgctgatcgcatcctgttctcgaccgactggccgtttgaaaacattgatcatgccgctgactggtttaatgctacgtctattgccgaagctgaccgtgtcaaaatcggccgcaccaatgcccgtcgtctgttcaaactggatggccgt

SEQ ID NO: 871 - DNA, 984 bp, Artificial Sequence
  synthetic construct; Dicamba decarboxylase variant
atggctcaaggcaaagtggcactggaagaacatttcgcaatcccggaaacgctgaacgacgccgcagatttcgtcccgggcgactactggaaagaactgcagcatcgtctgctggatatccaagacactcgcctgaaactgatggataaacacgagatcgaaacgatgattctgtccctggctgcaccggctgttcaggcgattccggaccgtgtcaaagccattgaaatcgcacgtcgcgctaatgatttcctggcagaagaagtagctaaacgtccggaccgctttctggcattcgcagcactgccgctgcaggatgtggacgcagctaccgaagaactgcaacgttgtgtcaacgatctgggcttcgtgggtgcgatggttaatggctttagccaggaaggcgatggtcaaaccccgctgtattacgacctgccgcagtatcgcccgttctggggtgaagtcgaaaaactggatgtgccgttttatctgcatccgcgtaacccgctgccgcaggattcccgtatctacgacggtcacccgtggctgctgggtccgacctgggcgttcgcccaagaaacggcggtgcatgccctgcgtctgatggcatctggcctgtttgatgaacacccgcgtctgaacattatcctgggtcatatgggcgaaggtctgccgtacatgatgtaccgtatcgatcatcgtatcgcatgggttaaagctccgccggattatccggcaaaacgtcgctttatggactacttcctcgaaaattttcacattaccacgtcaggcaacttccgtacccagacgctgattgatgcaatcctggaaattggtgctgatcgcatcctgttctcgaccgactggccgtttgaaaacattgatcatgccgctgactggtttaatgctacgtctattgccgaagctgaccgtgtcaaaatcggccgcaccaatgcccgtcgtctgttcaaactggatggccgt

SEQ ID NO: 872 - DNA, 984 bp, Artificial Sequence
  synthetic construct; Dicamba decarboxylase variant
atggctcaaggcaaagtggcactggaagaacatttcgcaatcccggaaacgctgcaagacgccgcaggtttcgtcccgggcgactactggaaagaactgcagcatcgtctgctggatatccaagacactcgcctgaaactgatggataaacacgagatcgaaacgatgattctgtccctggctgcaccggctgttcaggcgattccggaccgtcgcaaagccattgaaatcgcacgtcgcgctaatgatttcctggcagaagaagttgctaaacgtccggaccgctttctggcattcgcagcactgccgctgcaggatccggacgcagctaccgaagaactgcaacgttgtgtcaacgatctgggcttcgtgggtgcgatggttaatggctttagccaggaaggcgatggtcaaaccccgctgtattacgacctgccgcagtatcgcccgttctggggtgaagtcgaaaaactggatgtgccgttttatctgcatccgcgtaacccgctgccgcaggattcccgtatctacgacggtcacccgtggctgctgggtccgacctgggcgttcgcccaagaaacggcggtgcatgccctgcgtctgatggcatctggcctgtttgatgaacacccgcgtctgaacattatcctgggtcatatgggcgaaggtctgccgtacatgatgtaccgtatcgatcatcgtatcgcatgggttaaagctccgccggattatccggcaaaacgtcgctttatggactacttcaacgaaaattttcacattaccacgtcaggcaacttccgtacccagacgctgattgatgcaatcctggaaattggtgctgatcgcatcctgttctcgaccgactggccgtttgaaaacattgatcatgccgctgactggtttaatgctacgtctattgccgaagctgaccgtgtcaaaatcggccgcaccaatgcccgtcgtctgttcaaactggatggccgt

SEQ ID NO: 873 - DNA, 984 bp, Artificial Sequence
  synthetic construct; Dicamba decarboxylase variant
atggctcaaggcaaagtggcactggaagaacatttcgcaatcccggaaacgctgcaagacgccgcaggtttcgtcccgggcgactactggaaagaactgcagcatcgtctgctggatatccaagacactcgcctgaaactgatggataaacacgagatcgaaacgatgattctgtccctggctgcaccggctgttcaggcgattccggaccgtcgcaaagccattgaaatcgcacgtcgcgctaatgatttcctggcagaagaagttgctaaacgtccggaccgctttctggcattcgcagcactgccgctgcaggatccggacgcagctaccgaagaactgcaacgttgtgtcaacgatctgggcttcgtgggtgcgatggttaatggctttagccaggaaggcgatggtcaaaccccgctgtattacgacctgccgcagtatcgcccgttctggggtgaagtcgaaaaactggatgtgccgttttatctgcatccgcgtaacccgctgccgcaggattcccgtatctacgacggtcacccgtggctgctgggtccgacctgggcgttcgcccaagaaacggcggtgcatgccctgcgtctgatggcatctggcctgtttgatgaacacccgcgtctgaacattatcctgggtcatatgggcgaaggtctgccgtacatgatgtaccgtatcgatcatcgtatcgcatgggttgaagctccgccggattatccggcaaaacgtcgctttatggactacttcaacgaaaattttcacattaccacgtcaggcaacttccgtacccagacgctgattgatgcaatcctggaaattggtgctgatcgcatcctgttctcgaccgactggccgtttgaaaacattgatcatgccgctgactggtttaatgctacgtctattgccgaagctgaccgtgtcaaaatcggccgcaccaatgcccgtcgtctgttcaaactggatggccgt

SEQ ID NO: 874 - DNA, 984 bp, Artificial Sequence
  synthetic construct; Dicamba decarboxylase variant
atggctcaaggcaaagtggcactggaagaacatttcgcaatcccggaaacgctgaacgacgccgcaggtttcgtcccgggcgactactggaaagaactgcagcatcgtctgctggatatccaagacactcgcctgaaactgatggataaacacgagatcgaaacgatgattctgtccctggctgcaccggctgttcaggcgattccggaccgtgtcaaagccattgaaatcgcacgtcgcgctaatgatttcctggcagaagaagttgctaaacgtccggaccgctttctggcattcgcagcactgccgctgcaggatgtggacgcagctaccgaagaactgcaacgttgtgtcaacgatctgggcttcgtgggtgcgatggttaatggctttagccaggaaggcgatggtcaaaccccgctgtattacgacctgccgcagtatcgcccgttctggggtgaagtcgaaaaactggatgtgccgttttatctgcatccgcgtaacccgctgccgcaggattcccgtatctacgacggtcacccgtggctgctgggtccgacctgggcgttcgcccaagaaacggcggtgcatgccctgcgtctgatggcatctggcctgtttgatgaacacccgcgtctgaacattatcctgggtcatatgggcgaaggtctgccgtacatgatgtaccgtatcgatcatcgtatcgcatgggttaaagctccgccggattatccggcaaaacgtcgctttatggactacttcaacgaaaattttcacattaccacgtcaggcaacttccgtacccagacgctgattgatgcaatcctggaaattggtgctgatcgcatcctgttctcgaccgactggccgtttgaaaacattgatcatgccgctgactggtttaatgctacgtctattgccgaagctgaccgtgtcaaaatcggccgcaccaatgcccgtcgtctgttcaaactggatggccgt

SEQ ID NO: 875 - DNA, 984 bp, Artificial Sequence
  synthetic construct; Dicamba decarboxylase variant
atggctcaaggcaaagtggcactggaagaacatttcgcaatcccggaaacgctgcaagacgccgcaggtttcgtcccgggcgactactggaaagaactgcagcatcgtctgctggatatccaagacactcgcctgaaactgatggataaacacgagatcggaacgatgattctgtccctggctgcaccggctgttcaggcgattccggaccgtcgcaaagccattgaaatcgcacgtcgcgctaatgatttcctggcagaagaagttgctaaacgtccggaccgctttctggcattcgcagcactgccgctgcaggatgtggacgcagctaccgaagaactgcaacgttgtgtcaacgatctgggcttcgtgggtgcgatggttaatggcttcagccaggaaggcgatggtcaaaccccgctgtattacgacctgccgcagtatcgcccgttctggggtgaagtcgaaaaactggatgtgccgttttatctgcatccgcgtaacccgctgccgcaggattcccgtatctacgacggtcacccgtggctgctgggtccgacctgggcgttcgcccaagaaacggcggtgcatgccctgcgtctgatggcatctggcctgtttgatgaacacccgcgtctgaacattatcctgggtcatatgggcgaaggtctgccgtacatgatgtaccgtatcgatcatcgtatcgcatgggttaaagctccgccggattatccggcaaaacgtcgctttatggactacttcctcgaaaattttcacattaccacgtcaggcaacttccgtacccagacgctgattgatgcaatcctggaaattggtgctgatcgcatcctgttctcgaccgactggccgtttgaaaacattgatcatgccgctgactggtttaatgctacgtctattgccgaagctgaccgtgtcaaaatcggccgcaccaatgcccgtcgtctgttcaaactggatggccgt

SEQ ID NO: 876 - DNA, 984 bp, Artificial Sequence
  synthetic construct; Dicamba decarboxylase variant
atggctcaaggcaaagtggcactggaagaacatttcgcaatcccggaaacgctgcaagacgccgcaggtttcgtcccgggcgactactggaaagaactgcagcatcgtctgctggatatccaagacactcgcctgaaactgatggataaacacgagatcgaaacgatgattctgtccctggctgcaccggctgttcaggcgattccggaccgtgtcaaagccattgaaatcgcacgtcgcgctaatgatttcctggcagaagaagttgctaaacgtccggaccgctttctggcattcgcagcactgccgctgcaggatccggacgcagctaccgaagaactgcaacgttgtgtcaacgatctgggcttcgtgggtgcgatggttaatggctttagccaggaaggcgatggtcaaaccccgctgtattacgacctgccgcagtatcgcccgttctggggtgaagtcgaaaaactggatgtgccgttttatctgcatccgcgtaacccgctgccgcaggattcccgtatctacgacggtcacccgtggctgctgggtccgacctgggcgttcgcccaagaaacggcggtgcatgccctgcgtctgatggcatctggcctgtttgatgaacacccgcgtctgaacattatcctgggtcatatgggcgaaggtctgccgtacatgatgtaccgtatcgatcatcgtatcgcatgggttaaggctccgccggattatccggcaaaacgtcgctttatggactacttcaacgaaaattttcacattaccacgtcaggcaacttccgtacccagacgctgattgatgcaatcctggaaattggtgctgatcgcatcctgttctcgaccgactggccgtttgaaaacattgatcatgccgctgactggtttaatgctacgtctattgccgaagctgaccgtgtcaaaatcggccgcaccaatgcccgtcgtctgttcaaactggatggccgt

SEQ ID NO: 877 - DNA, 984 bp, Artificial Sequence
  synthetic construct; Dicamba decarboxylase variant
atggctcaaggcaaagtggcactggaagaacatttcgcaatcccggaaacgctgaacgacgccgcaggtttcgtcccgggcgactactggaaagaactgcagcatcgtctgctggatatccaagacactcgcctgaaactgatggataaacacgagatcgaaacgatgattctgtccctggctgcaccggctgttcaggcgattccggaccgtcgcaaagccattgaaatcgcacgtcgcgctaatgatttcctggcagaagaagttgctaaacgtccggaccgctttctggcattcgcagcactgccgctgcaggatgtggacgcagctaccgaagaactgcaacgttgtgtcaacgatctgggcttcgtgggtgcgatggttaatggctttagccaggaaggcgatggtcaaaccccgctgtattacgacctgccgcagtatcgcccgttctggggtgaagtcgaaaaactggatgtgccgttttatctgcatccgcgtaacccgctgccgcaggattcccgtatctacgacggtcacccgtggctgctgggtccgacctgggcgttcgcccaagaaacggcggtgcatgccctgcgtctgatggcatctggcctgtttgatgaacacccgcgtctgaacattatcctgggtcatatgggcgaaggtctgccgtacatgatgtaccgtatcgatcatcgtatcgcatgggttaaagctccgccggattatccggcaaaacgtcgctttatggactacttcaacgaaaattttcacattaccacgtcaggcaacttccgtacccagacgctgattgatgcaatcctggaaattggtgctgatcgcatcctgttctcgaccgactggccgtttgaaaacattgatcatgccgctgactggtttaatgctacgtctattgccgaagctgaccgtgtcaaaatcggccgcaccaatgcccgtcgcctgttcaaactggatggccgt

SEQ ID NO: 878 - DNA, 984 bp, Artificial Sequence
  synthetic construct; Dicamba decarboxylase variant
atggctcaaggcaaagtggcactggaagaacatttcgcaatcccggaaacgctgcaagacgccgcaggtttcgtcccgggcgactactggaaagaactgcagcatcgtctgctggatatccaagacactcgcctgaaactgatggataaacacgagatcgaaacgatgattctgtccctggctgcaccggctgttcaggcgattccggaccgtgtcaaagccattgaaatcgcacgtcgcgctaatgatttcctggcagaagaagttgctaaacgtccggaccgctttctggcattcgcagcactgccgctgcaggatgtggacgcagctaccgaagaactgcaacgttgtgtcaacgatctgggcttcgtgggtgcgatggttaatggctttagccaggaaggcgatggtcaaaccccgctgtattacgacctgccgcagtatcgcccgttctggggtgaagtcgaaaaactggatgtgccgttttatctgcatccgcgtaacccgctgccgcaggattcccgtatctacgacggtcacccgtggctgctgggtccgacctgggcgttcgcccaagaaacggcggtgcatgccctgcgtctgatggcatctggcctgtttgatgaacacccgcgtctgaacattatcctgggtcatatgggcgaaggtctgccgtacatgatgtaccgtatcgatcatcgtatcgcatgggttaaagctccgccggattatccggcaaaacgtcgctttatggactacttcaacgaaaattttcacattaccacgtcaggcaacttccgtacccagacgctgattgatgcaatcctggaaattggtgctgatcgcatcctgttctcgaccgactggccgtttgaaaacattgatcatgccgctgactggtttaatgctacgtctattgccgaagctgaccgtgtcaaaatcggccgcaccaatgcccgtcgtctgttcaaactggatggccgt

SEQ ID NO: 879 - DNA, 984 bp, Artificial Sequence
  synthetic construct; Dicamba decarboxylase variant
atggctcaaggcaaagtggcactggaagaacatttcgcaatcccggaaacgctgaacgacgccgcagatttcgtcccgagcgagtactggaaagaactgcagcatcgtctgctggatatccaagacactcgcctgaaactgatggataaacacgagatcgaaacgatgattctgtccctggctgcaccggctgttcaggcgattccggaccgtcgcaaagccattgaaatcgcacgtcgcgctaatgatttcctggcagaagaagttgctaaacgtccggaccgctttctggcattcgcagcactgccgctgcaggatccggacgcagctaccgaagaactgcaacgttgtgtcaacgatctgggcttcgtgggtgcgatggttaatggctttagccaggaaggcgatggtcaaaccccgctgtattacgacctgccgcagtatcgcccgttctggggtgaagtcgaaaaactggatgtgccgttttatctgcatccgcgtaacccgctgccgcaggattcccgtatctacgacggtcacccgtggctgctgggtccgacctgggcgttcgcccaagaaacggcggtgcatgccctgcgtctgatggcatctggcctgtttgatgaacacccgcgtctgaacattatcctgggtcatatgggcgaaggtctgccgtacatgatgtaccgtatcgatcatcgtatcgcatgggttaaagctccgccggattatccggcaaaacgtcgctttatggactacttcaacgaaaattttcacattaccacgtcaggcaacttccgtacccagacgctgattgatgcaatcctggaaattggtgctgatcgcatcctgttctcgaccgactggccgtttgaaaacattgatcatgccgctgactggtttaatgctacgtctattgccgaagctgaccgtgtcaaaatcggccgcaccaatgcccgtcgtctgttcaaactggatggccgt

SEQ ID NO: 880 - DNA, 984 bp, Artificial Sequence
  synthetic construct; Dicamba decarboxylase variant
atggctcaaggcaaagtggcactggaagaacatttcgcaatcccggaaacgctgcaagacgccgcaggtttcgtcccgggcgactactggaaagaactgcagcatcgtctgctggatatccaagacactcgcctgaaactgatggataaacacgagatcggaacgatgattctgtccctggctgcaccggctgttcaggcgattccggaccgtgtcaaagccattgaaatcgcacgtcgcgctaatgatttcctggcagaagaagttgctaaacgtccggaccgctttctggcattcgcagcactgccgctgcaggatccggacgcagctaccgaagaactgcaacgttgtgtcaacgatctgggcttcgtgggtgccctggttaatggctttagccaggaaggcgatggtcaaaccccgctgtattacgacctgccgcagtatcgcccgttctggggtgaagtcgaaaaactggatgtgccgttttatctgcatccgcgtaacccgctgccgcaggattcccgtatctacgacggtcacccgtggctgctgggtccgacctgggcgttcgcccaagaaacggcggtgcatgccctgcgtctgatggcatctggcctgtttgatgaacacccgcgtctgaacattatcctgggtcatatgggcgaaggtctgccgtacatgatgtaccgtatcgatcatcgtatcgcatgggttaaagctccgccggattatccggcaaaacgtcgctttatggactacttcctcgaaaattttcacattaccacgtcaggcaacttccgtacccagacgctgattgatgcaatcctggaaattggtgctgatcgcatcctgttctcgaccgactggccgtttgaaaacattgatcatgccgctgactggtttaatgctacgtctattgccgaagctgaccgtgtcaaaatcggccgcaccaatgcccgtcgtctgttcaaactggatggccgt

SEQ ID NO: 881 - DNA, 984 bp, Artificial Sequence
  synthetic construct; Dicamba decarboxylase variant
atggctcaaggcaaagtggcactggaagaacatttcgcaatcccggaaacgctgcaagacgccgcaggtttcgtcccgggcgactactggaaagaactgcagcatcgtctgctggatatccaagacactcgcctgaaactgatggataaacacgagatcgaaacgatgattctgtccctggctgcaccggctgttcaggcgattccggaccgtgtcaaagccattgaaatcgcacgtcgcgctaatgatttcctggcagaagaagttgctaaacgtccggaccgctttctggcattcgcagcactgccgctgcaggatgtggacgcagctaccgaagaactgcaacgttgtgtcaacgatctgggcttcgtgggtgcgatggttaatggctttagccaggaaggcgatggtcaaaccccgctgtattacgacctgccgcagtatcgcccgttctggggtgaagtcgaaaaactggatgtgccgttttatctgcatccgcgtaacccgctgccgcaggattcccgtatctacgacggtcacccgtggctgctgggtccgacctgggcgttcgcccaagaaacggcggtgcatgccctgcgtctgatggcatctggcctgtttgatgaacacccgcgtctgaacattatcctgggtcatatgggcgaaggtctgccgtacatgatgtaccgtatcgatcatcgtatcgcatgggttaaagctccgccggattatccggcaaaacgtcgctttatggactacttcctcgaaaattttcacattaccacgtcaggcaacttccgtacccagacgctgattgatgcaatcctggaaattggtgctgatcgcatcctgttctcgaccgactggccgtttgaaaacattgatcatgccgctgactggtttaatgctacgtctattgccgaagctgaccgtgtcaaaatcggccgcaccaatgcccgtcgtctgttcaaactggatggccgt

SEQ ID NO: 882 - DNA, 984 bp, Artificial Sequence
  synthetic construct; Dicamba decarboxylase variant
atggctcaaggcaaagtggcactggaagaacatttcgcaatcccggaaacgctgcaagacgccgcaggtttcgtcccgggcgactactggaaagaactgcagcatcgtctgctggatatccaagacactcgcctgaaactgatggataaacacgagatcggaacgatgattctgtccctggctgcaccggctgttcaggcgattccggaccgtcgcaaagccattgaaatcgcacgtcgcgctaatgatttcctggcagaagaagttgctaaacgtccggaccgctttctggcattcgcagcactgccgctgcaggatgtggacgcagctaccgaagaactgcaacgttgtgtcaacgatctgggcttcgtgggtgccctggttaatggctttagccaggaaggcgatggtcaaaccccgctgtattacgacctgccgcagtatcgcccgttctggggtgaagtcgaaaaactggatgtgccgttttatctgcatccgcgtaacccgctgccgcaggattcccgtatctacgacggtcacccgtggctgctgggtccgacctgggcgttcgcccaagaaacggcggtgcatgccctgcgtctgatggcatctggcctgtttgatgaacacccgcgtctgaacattatcctgggtcatatgggcgaaggtctgccgtacatgatgtaccgtatcgatcatcgtatcgcatgggttaaagctccgccggattatccggcaaaacgtcgctttatggactacttcaacgaaaattttcacattaccacgtcaggcaacttccgtacccagacgctgattgatgcaatcctggaaattggtgctgatcgcatcctgttctcgaccgactggccgtttgaaaacattgatcatgccgctgactggtttaatgctacgtctattgccgaagctgaccgtgtcaaaatcggccgcaccaatgcccgtcgtctgttcaaactggatggccgt

SEQ ID NO: 883 - DNA, 984 bp, Artificial Sequence
  synthetic construct; Dicamba decarboxylase variant
atggctcaaggcaaagtggcactggaagaacatttcgcaatcccggaaacgctgcaagacgccgcaggtttcgtcccgggcgactactggaaagaactgcagcatcgtctgctggatatccaagacactcgcctgaaactgatggataaacacgagatcgaaacgatgattctgtccctggctgcaccggctgttcaggcgattccggaccgtcgcaaagccattgaaatcgcacgtcgcgctaatgatttcctggcagaagaagttgctaaacgtccggaccgctttctggcattcgcagcactgccgctgcaggatgtggacgcagctaccgaagaactgcaacgttgtgtcaacgatctgggcttcgtgggtgccctggttaatggctttagccaggaaggcgatggtcaaaccccgctgtattacgacctgccgcagtatcgcccgttctggggtgaagtcgaaaaactggatgtgccgttttatctgcatccgcgtaacccgctgccgcaggattcccgtatctacgacggtcacccgtggctgctgggtccgacctgggcgttcgcccaagaaacggcggtgcatgccctgcgtctgatggcatctggcctgtttgatgaacacccgcgtctgaacattatcctgggtcatatgggcgaaggtctgccgtacatgatgtaccgtatcgatcatcgtatcgcatgggttaaagctccgccggattatccggcaaaacgtcgctttatggactacttcctcgaaaattttcacattaccacgtcaggcaacttccgtacccagacgctgattgatgcaatcctggaaattggtgctgatcgcatcctgttctcgaccgactggccgtttgaaaacattgatcatgccgctgactggtttaatgctacgtctattgccgaagctgaccgtgtcaaaatcggccgcaccaatgcccgtcgtctgttcaaactggatggccgt

SEQ ID NO: 884 - DNA, 984 bp, Artificial Sequence
  synthetic construct; Dicamba decarboxylase variant
atggctcaaggcaaagtggcactggaagaacatttcgcaatcccggaaacgctgcaagacgccgcaggtttcgtcccgggcgactactggaaagaactgcagcatcgtctgctggatatccaagacactcgcctgaaactgatggataaacacgagatcggaacgatgattctgtccctggctgcaccggctgttcaggcgattccggaccgtgtcaaagccattgaaatcgcacgtcgcgctaatgatttcctggcagaagaagttgctaaacgtccggaccgctttctggcattcgcagcactgccgctgcaggatgtggacgcagctaccgaagaactgcaacgttgtgtcaacgatctgggcttcgtgggtgcgatggttaatggctttagccaggaaggcgatggtcaaaccccgctgtattacgacctgccgcagtatcgcccgttctggggtgaagtcgaaaaactggatgtgccgttttatctgcatccgcgtaacccgctgccgcaggattcccgtatctacgacggtcacccgtggctgctgggtccgacctgggcgttcgcccaagaaacggcggtgcatgccctgcgtctgatggcatctggcctgtttgatgaacacccgcgtctgaacattatcctgggtcatatgggcgaaggtctgccgtacatgatgtaccgtatcgatcatcgtatcgcatgggttaaagctccgccggattatccggcaaaacgtcgctttatggactacttcctcgaaaattttcacattaccacgtcaggcaacttccgtacccagacgctgattgatgcaatcctggaaattggtgctgatcgcatcctgttctcgaccgactggccgtttgaaaacattgatcatgccgctgactggtttaatgctacgtctattgccgaagctgaccgtgtcaaaatcggccgcaccaatgcccgtcgtctgttcaaactggatggccgt

SEQ ID NO: 885 - DNA, 984 bp, Artificial Sequence
  synthetic construct; Dicamba decarboxylase variant
atggctcaaggcaaagtggcactggaagaacatttcgcaatcccggaaacgctgcaagacgccgcaggtttcgtcccgggcgactactggaaagaactgcagcatcgtctgctggatatccaagacactcgcctgaaactgatggataaacacgagatcgaaacgatgattctgtccctggctgcaccggctgttcaggcgattccggaccgtcgcaaagccattgaaatcgcacgtcgcgctaatgatttcctggcagaagaagttgctaaacgtccggaccgctttctggcattcgcagcactgccgctgcaggatgtggacgcagctaccgaagaactgcaacgttgtgtcaacgatctgggcttcgtgggtgcgatggttaatggctttagccaggaaggcgatggtcaaaccccgctgtattacgacctgccgcagtatcgcccgttctggggtgaagtcgaaaaactggatgtgccgttttatctgcatccgcgtaacccgctgccgcaggattcccgtatctacgacggtcacccgtggctgctgggtccgacctgggcgttcgcccaagaaacggcggtgcatgccctgcgtctgatggcatctggcctgtttgatgaacacccgcgtctgaacattatcctgggtcatatgggcgaaggtctgccgtacatgatgtaccgtatcgatcatcgtatcgcatgggttaaagctccgccggattatccggcaaaacgtcgctttatggactacttcaacgaaaattttcacattaccacgtcaggcaacttccgtacccagacgctgattgatgcaatcctggaaattggtgctgatcgcatcctgttctcgaccgactggccgtttgaaaacattgatcatgccgctgactggtttaatgctacgtctattgccgaagctgaccgtgtcaaaatcggccgcaccaatgcccgtcgtctgttcaaactggatggccgt

SEQ ID NO: 886 - DNA, 984 bp, Artificial Sequence
  synthetic construct; Dicamba decarboxylase variant
atggctcaaggcaaagtggcactggaagaacatttcgcaatcccggaaacgctgaacgacgccgcaggtttcgtcccgggcgactactggaaagaactgcagcatcgtctgctggatatccaagacactcgcctgaaactgatggataaacacgagatcgaaacgatgattctgtccctggctgcaccggctgttcaggcgattccggaccgtcgcaaagccattgaaatcgcacgtcgcgctaatgatttcctggcagaagaagttgctaaacgtccggaccgctttctggcattcgcagcactgccgctgcaggatccggacgcagctaccgaagaactgcaacgttgtgtcaacgatctgggcttcgtgggtgcgatggttaatggctttagccaggaaggcgatggtcaaaccccgctgtattacgacctgccgcagtatcgcccgttctggggtgaagtcgaaaaactggatgtgccgttttatctgcatccgcgtaacccgctgccgcaggattcccgtatctacgacggtcacccgtggctgctgggtccgacctgggcgttcgcccaagaaacggcggtgcatgccctgcgtctgatggcatctggcctgtttgatgaacacccgcgtctgaacattatcctgggtcatatgggcgaaggtctgccgtacatgatgtaccgtatcgatcatcgtatcgcatgggttaaagctccgccggattatccggcaaaacgtcgctttatggactacttcaacgaaaattttcacattaccacgtcaggcaacttccgtacccagacgctgattgatgcaatcctggaaattggtgctgatcgcatcctgttctcgaccgactggccgtttgaaaacattgatcatgccgctgactggtttaatgctacgtctattgccgaagctgaccgtgtcaaaatcggccgcaccaatgcccgtcgtctgttcaaactggatggccgt

SEQ ID NO: 887 - DNA, 984 bp, Artificial Sequence
  synthetic construct; Dicamba decarboxylase variant
atggctcaaggcaaagtggcactggaagaacatttcgcaatcccggaaacgctgaacgacgccgcaggtttcgtcccgggcgactactggaaagaactgcagcatcgtctgctggatatccaagacactcgcctgaaactgatggataaacacgagatcggaacgatgattctgtccctggctgcaccggctgttcaggcgattccggaccgtcgcaaagccattgaaatcgcacgtcgcgctaatgatttcctggcagaagaagttgctaaacgtccggaccgctttctggcattcgcagcactgccgctgcaggatgtggacgcagctaccgaagaactgcaacgttgtgtcaacgatctgggcttcgtgggtgcgatggttaatggctttagccaggaaggcgatggtcaaaccccgctgtattacgacctgccgcagtatcgcccgttctggggtgaagtcgaaaaactggatgtgccgttttatctgcatccgcgtaacccgctgccgcaggattcccgtatctacgacggtcacccgtggctgctgggtccgacctgggcgttcgcccaagaaacggcggtgcatgccctgcgtctgatggcatctggcctgtttgatgaacacccgcgtctgaacattatcctgggtcatatgggcgaaggtctgccgtacatgatgtaccgtatcgatcatcgtatcgcatgggttaaagctccgccggattatccggcaaaacgtcgctttatggactacttcctcgaaaattttcacattaccacgtcaggcaacttccgtacccagacgctgattgatgcaatcctggaaattggtgctgatcgcatcctgttctcgaccgactggccgtttgaaaacattgatcatgccgctgactggtttaatgctacgtctattgccgaagctgaccgtgtcaaaatcggccgcaccaatgcccgtcgtctgttcaaactggatggccgt

SEQ ID NO: 888 - DNA, 984 bp, Artificial Sequence
  synthetic construct; Dicamba decarboxylase variant
atggctcaaggcaaagtggcactggaagaacatttcgcaatcccggaaacgctgcaagacgccgcaggtttcgtcccgggcgactactggaaagaactgcagcatcgtctgctggatatccaagacactcgcctgaaactgatggataaacacgagatcgaaacgatgattctgtccctggctgcaccggctgttcaggcgattccggaccgtcgcaaagccattgaaatcgcacgtcgcgctaatgatttcctggcagaagaagttgctaaacgtccggaccgctttctggcattcgcagcactgccgatgcaggatgtggacgcagctaccgaagaactgcaacgttgtgtcaacgatctgggcttcgtgggtgccctggttaatggctttagccaggaaggcgatggtcaaaccccgctgtattacgacctgccgcagtatcgcccgttctggggtgaagtcgaaaaactggatgtgccgttttatctgcatccgcgtaacccgctgccgcaggattcccgtatctacgacggtcacccgtggctgctgggtccgacctgggcgttcgcccaagaaacggcggtgcatgccctgcgtctgatggcatctggcctgtttgatgaacacccgggtctgaacattatcctgggtcatatgggcgaaggtctgccgtacatgatgtaccgtatcgatcatcgtatcgcatgggttaaagctccgccggattatccggcaaaacgtcgctttatggactacttcaacgaaaattttcacattaccacgtcaggcaacttccgtacccagacgctgattgatgcaatcctggaaattggtgctgatcgcatcctgttctcgaccgactggccgtttgaaaacattgatcatgccgctgactggtttaatgctacgtctattgccgaagctgaccgtgtcaaaatcggccgcaccaatgcccgtcgtctgttcaaactggatctccgt

SEQ ID NO: 889 - DNA, 984 bp, Artificial Sequence
  synthetic construct; Dicamba decarboxylase variant
atggctcaaggcaaagtggcactggaagaacatttcgcaatcccggaaacgctgaacgacgccgcaggtttcgtcccgggcgactactggaaagaactgcagcatcgtctgctggatatccaagacactcgcctgaaactgatggataaacacgagatcgaaacgatgattctgtccctggctgcaccggctgttcaggcgattccggaccgtcgcaaagccattgaaatcgcacgtcgcgctaatgatttcctggcagaagaagttgctaaacgtccggaccgctttctggcattcgcagcactgccgctgcaggatgtggacgcagctaccgaagaactgcaacgttgtgtcaacgatctgggcttcgtgggtgccctggttaatggctttagcgtggaaggcgatggtcaaaccccgctgtattacgacctgccgcagtatcgcccgttctggggtgaagtcgaaaaactggatgtgccgttttatctgcatccgcgtaacccgctgccgcaggattcccgtatctacgacggtcacccgtggctgctgggtccgacctgggcgttcgcccaagaaacggcggtgcatgccctgcgtctgatggcatctggcctgtttgatgaacacccgcgtctgaacattatcctgggtcatatgggcgaaggtctgccgtacatgatgtaccgtatcgatcatcgtatcgcatgggttaaagctccgccggattatccggcaaaacgtcgctttatggactacttcctcgaaaattttcacattaccacgtcaggcaacttccgtacccagacgctgattgatgcaatcctggaaattggtgctgatcgcatcctgttctcgaccgactggccgtttgaaaacattgatcatgccgctgcctggtttaatgctacgtctattgccgaagctgaccgtctcaaaatcggccgcaccaatgcccgtcgtctgttcaaactggatctccgt

SEQ ID NO: 890 - DNA, 984 bp, Artificial Sequence
  synthetic construct; Dicamba decarboxylase variant
atggctcaaggcaaagtggcactggaagaacatttcgcaatcccggaaacgctgcaagacgccgcaggtttcgtcccgggcgactactggaaagaactgcagcatcgtctgctggatatccaagacactcgcctgaaactgatggataaacacgagatcgaaacgatgattctgtccctggctgcaccggctgttcaggcgattccggaccgtcgcaaagccattgaaatcgcacgtcgcgcaaatgatttcctggcagaagaagttgctaaacgtccggaccgctttctggcattcgcagcactgccgatgcaggatccggacgcagctaccgaagaactgcaacgtactgtccgcactctgggcttcgtgggtgcgatggttaatggctttagcgtggaaggcgatggtcaaaccccgctgtattacgacctgccgcagtatcgcccgttctggggtgaagtcgaaaaactggatgtgccgttttatctgcatccgcgtaacccgctgccgcaggattcccgtatctacgacggtcacccgtggctgctgggtccgacctgggcgttcgcccaagaaacggcggtgcatgccctgcgtctgatggcatctggcctgtttgatgaacacccgggtctgaacattatcctgggtcatctgggcgaaggtctgccgtacatgatgtaccgtatcgatcatcgtatcgcatgggttaaagctccgccggattatccggcaaaacgtcgctttatggactacttcctcgaaaattttcacattaccacgtcaggcaacttccgtacccagacgctgattgatgcaatcctggaaattggtgctgatcgcatcctgttctcgaccgactggccgtttgaaaacattgatcatgccgctgactggtttaatgctacgtctattgccgaagctgaccgtgtcaaaatcggccgcaccaatgcccgtcgtctgttcaaactggatctccgt

SEQ ID NO: 891 - DNA, 984 bp, Artificial Sequence
  synthetic construct; Dicamba decarboxylase variant
atgactcaaggcaaagtggcactggaagaacatttcgcaatcccggaaacgctgcaagacgccgcagatttcgtcccgggcgactactggaaagaactgcagcatcgtctgctggatatccaagaccaacgcctgagactgatggataaacacgagatcggaacgatgattctgtccctggctgcaccggctgttcaggcgattccggaccgtcgcaaagccattgaaatcgcacgtcgcgctaatgatttcctggcagaagaagttgctaaacgtccggaccgctttctggcattcgcagcactgccgatgcaggatccggacgcagctaccgaagaactgcaacgttgtgtcaacgatctgggcttcgtgggtgccctggttaatggctttagccaggaaggcgatggtcaaaccccgctgtattacgacctgccgcagtatcgcccgttctggggtgaagtcgaaaaactggatgtgccgttttatctgcatccgcgtaacccgctgccgcaggattcccgtatctacgacggtcacccgtggctgctgggtccgacctgggcgttcgcccaagaaacggcggtgcatgccctgcgtctgatggcatctggcctgtttgatgaacacccgggtctgaacattatcctgggtcatatgggcgaaggtctgccgtacatgatgtaccgtatcgatcatcgtatcggatgggttaaagctccgccggattatccggcaaaacgtcgctttatggactacttcctcgaaaattttcacattaccacgtcaggcaacttccgtacccagacgctgattgatgcaatcctggaaattggtgctgatcgcatcctgttctcgaccgactggccgtttgaaaacattgatcatgccgctgcctggtttaatgctacgtctattgccgaagctgaccgtgtcaaaatcggccgcaccaatgcccgtcgtctgttcaaactggatggccgt

SEQ ID NO: 892 - DNA, 984 bp, Artificial Sequence
  synthetic construct; Dicamba decarboxylase variant
atggctcaaggcaaagtggcactggaagaacatttcgcaatcccggaaacgctgcaagacgccgcaggtttcgtcccgggcgactactggaaagaactgcagcatcgtctgctggatatccaagacactcgcctgaaactgatggataaacacgagatcgaaacgatgattctgtccctggctgcaccggctgttcaggcgattccggaccgtcgcaaagccattgaaatcgcacgtcgcgctaatgatttcctggcagaagaagttgctaaacgtccggaccgctttctggcattcgcagcactgccgctgcaggatccggacgcagcttccgaagaactgcaacgtactgtccgcactctgggcttcgtgggtgcgatggttaatggctttagcgtggaaggcgatggtcaaaccccgctgtattacgacctgccgcagtatcgcccgttctggggtgaagtcgaaaaactggatgtgccgttttatctgcatccgcgtaacccgctgccgcaggattcccgtatctacgacggtcacccgtggctgctgggtccgacctgggcgttcgcccaagaaacggcggtgcatgccctgcgtctgatggcatctggcctgtttgatgaacacccgcgtctgaacattatcctgggtcatatgggcgaaggtctgccgtacatgatgtaccgtatcgatcatcgtatcgcatgggttaaagctccgccggattatccggcaaaacgtcgctttatggactacttcaacgaaaattttcacattaccacgtcaggcaacttccgtacccagacgctgattgatgcaatcctggaaattggtgctgatcgcatcctgttctcgaccgactggccgtttgaaaacattgatcatgccgctgcctggtttaatgctacgtctattgccgaagctgaccgtgtcaaaatcggccgcaccaatgcccgtcgtctgttcaaactggatggccgt

SEQ ID NO: 893 - DNA, 984 bp, Artificial Sequence
  synthetic construct; Dicamba decarboxylase variant
atggctcaaggcaaagtggcactggaagaacatttcgcaatcccggaaacgctgcaagacgccgcaggtttcgtcccgggcgactactggaaagaactgcagcatcgtctgctggatatccaagaccaacgcctgagactgatggataaacacgagatcgaaacgatgattctgtccctggctgcaccggctgttcaggcgattccggaccgtcgcaaagccattgaaatcgcacgtcgcgctaatgatttcctggcagaagaagttgctaaacgtccggaccgctttctggcattcgcagcactgccgctgcaggatccggacgcagctaccgaagaactgcaacgttgtgtcaacgatctgggcttcgtgggtgcgatggttaatggctttagcgtggaaggcgatggtcaaaccccgctgtattacgacctgccgcagtatcgcccgttctggggtgaagtcgaaaaactggatgtgccgttttatctgcatccgcgtaacccgctgccgcaggattcccgtatctacgacggtcacccgtggctgctgggtccgacctgggcgttcgcccaagaaacggcggtgcatgccctgcgtctgatggcatctggcctgtttgatgaacacccgcgtctgaacattatcctgggtcatctgggcgaaggtctgccgtacatgatgtaccgtatcgatcatcgtatcgcatgggttaaagctccgccggattatccggcaaaacgtcgctttatggactacttcaacgaaaattttcacattaccacgtcaggcaacttccgtacccagacgctgattgatgcaatcctggaaattggtgctgatcgcatcctgttctcgaccgactggccgtttgaaaacattgatcatgccgctgcctggtttaatgctacgtctattgccgaagctgaccgtctcaaaatcggccgcaccaatgcccgtcgtctgttcaaactggatctccgt

SEQ ID NO: 894 - DNA, 984 bp, Artificial Sequence
  synthetic construct; Dicamba decarboxylase variant
atggctcaaggcaaagtggcactggaagaacatttcgcaatcccggaaacgctgaacgacgccgcaggtttcgtcccgggcgactactggaaagaactgcagcatcgtctgctggatatccaagacactcgcctgaaactgatggataaacacgagatcggaacgatgattctgtccctggctgcaccggctgttcaggcgattccggaccgtcgcaaagccattgaaatcgcacgtcgcgctaatgatttcctggcagaagaagttgctaaacgtccggaccgctttctggcattcgcagcactgccgatgcaggatgtggacgcagctaccgaagaactgcaacgttgtgtcaacgatctgggcttcgtgggtgccctggttaatggctttagccaggaaggcgatggtcaaaccccgctgtattacgacctgccgcagtatcgcccgttctggaaagaagtcgaaaaactggatgtgccgttttatctgcatccgcgtaacccgctgccgcaggattcccgtatctacgacggtcacccgtggctgctgggtccgacctgggcgttcgcccaagaaacggcggtgcatgccctgcgtctgatggcatctggcctgtttgatgaacacccgcgtctgaacattatcctgggtcatctgggcgaaggtctgccgtacatgatgtaccgtatcgatcatcgtatcgcatgggttaaagctccgccggattatccggcaaaacgtcgctttatggactacttcaacgaaaattttcacattaccacgtcaggcaacttccgtacccagacgctgattgatgcaatcctggaaattggtgctgatcgcatcctgttctcgaccgactggccgtttgaaaacattgatcatgccgctgcctggtttaatgctacgtctattgccgaagctgaccgtgtcaaaatcggccgcaccaatgcccgtcgtctgttcaaactggatggccgt

SEQ ID NO: 895 - DNA, 984 bp, Artificial Sequence
  synthetic construct; Dicamba decarboxylase variant
atggctcaaggcaaagtggcactggaagaacatttcgcaatcccggaaacgctgaacgacgccgcaggtttcgtcccgggcgactactggaaagaactgcagcatcgtctgctggatatccaagacactcgcctgaaactgatggataaacacgagatcgaaacgatgattctgtccctggctgcaccggctgttcaggcgattccggaccgtcgcaaagccattgaaatcgcacgtcgcgctaatgatttcctggcagaagaagttgctaaacgtccggaccgctttctggcattcgcagcactgccgctgcaggatccggacgcagctaccgaagaactgcaacgttgtgtcaacgatctgggcttcgtgggtgcgatggttaatggctttagcgtggaaggcgatggtcaaaccccgctgtattacgacctgccgcagtatcgcccgttctggggtgaagtcgaaaaactggatgtgccgttttatctgcatccgcgtaacccgctgccgcaggattcccgtatctacgacggtcacccgtggctgctgggtccgacctgggcgttcgcccaagaaacggcggtgcatgccctgcgtctgatggcatctggcctgtttgatgaacacccgcgtctgaacattatcctgggtcatatgggcgaaggtctgccgtacatgatgtaccgtatcgatcatcgtatcgcatgggttaaagctccgccggattatccggcaaaacgtcgctttatggactacttcaacgaaaattttcacattaccacgtcaggcaacttccgtacccagacgctgattgatgcaatcctggaaattggtgctgatcgcatcctgttctcgaccgactggccgtttgaaaacattgatcatgccgctgcctggtttaatgctacgtctattgccgaagctgaccgtgtcaaaatcggccgcaccaatgcccgtcgtctgttcaaactggatggccgt

SEQ ID NO: 896 - DNA, 984 bp, Artificial Sequence
  synthetic construct; Dicamba decarboxylase variant
atggctcaaggcaaagtggcactggaagaacatttcgcaatcccggaaacgctgaacgacgccgcaggtttcgtcccgggcgactactggaaagaactgcagcatcgtctgctggatatccaagaccaacgcctgagactgatggataaacacgagatcgaaacgatgattctgtccctggctgcaccggctgttcaggcgattccggaccgtcgcaaagccattgaaatcgcacgtcgcgctaatgatttcctggcagaagaagttgctaaacgtccggaccgctttctggcattcgcagcactgccgctgcaggatccggacgcagcttccgaagaactgcaacgtactgtccgcactctgggcttcgtgggtgcgatggttaatggctttagccaggaaggcgatggtcaaaccccgctgtattacgacctgccgcagtatcgcccgttctggggtgaagtcgaaaaactggatgtgccgttttatctgcatccgcgtaacccgctgccgcaggattcccgtatctacgacggtcacccgtggctgctgggtccgacctgggcgttcgcccaagaaacggcggtgcatgccctgcgtctgatggcatctggcctgtttgatgaacacccgggtctgaacattatcctgggtcatctgggcgaaggtctgccgtacatgatgtaccgtatcgatcatcgtatcgcatgggttaaagctccgccggattatccggcaaaacgtcgctttatggactacttcaacgaaaattttcacattaccacgtcaggcaacttccgtacccagacgctgattgatgcaatcctggaaattggtgctgatcgcatcctgttctcgaccgactggccgtttgaaaacattgatcatgccgctgcctggtttaatgctacgtctattgccgaagctgaccgtctcaaaatcggccgcaccaatgcccgtcgtctgttcaaactggatggccgt

SEQ ID NO: 897 - DNA, 984 bp, Artificial Sequence
  synthetic construct; Dicamba decarboxylase variant
atggctcaaggcaaagtggcactggaagaacatttcgcaatcccggaaacgctgcaagacgccgcaggtttcgtcccgggcgactactggaaagaactgcagcatcgtctgctggatatccaagacactcgcctgaaactgatggataaacacgagatcgaaacgatgattctgtccctggctgcaccggctgttcaggcgattccggaccgtcgcaaagccattgaaatcgcacgtcgcgctaatgatttcctggcagaagaagttgctaaacgtccggaccgctttctggcattcgcagcactgccgctgcaggatccggacgcagctaccgaagaactgcaacgtactgtccgcactctgggcttcgtgggtgcgatggttaatggctttagcgtggaaggcgatggtcaaaccccgctgtattacgacctgccgcagtatcgcccgttctggggtgaagtcgaaaaactggatgtgccgttttatctgcatccgcgtaacccgctgccgcaggattcccgtatctacgacggtcacccgtggctgctgggtccgacctgggcgttcgcccaagaaacggcggtgcatgccctgcgtctgatggcatctggcctgtttgatgaacacccgcgtctgaacattatcctgggtcatctgggcgaaggtctgccgtacatgatgtaccgtatcgatcatcgtatcggatgggttaaagctccgccggattatccggcaaaacgtcgctttatggactacttcctcgaaaattttcacattaccacgtcaggcaacttccgtacccagacgctgattgatgcaatcctggaaattggtgctgatcgcatcctgttctcgaccgactggccgtttgaaaacattgatcatgccgctgcctggtttaatgctacgtctattgccgaagctgaccgtctcaaaatcggccgcaccaatgcccgtcgtctgttcaaactggatggccgt

SEQ ID NO: 898 - DNA, 984 bp, Artificial Sequence
  synthetic construct; Dicamba decarboxylase variant
atggctcaaggcaaagtggcactggaagaacatttcgcaatcccggaaacgctgcaagacgccgcaggtttcgtcccgggcgactactggaaagaactgcagcatcgtctgctggatatccaagaccaacgcctgagactgatggataaacacgagatcggaacgatgattctgtccctggctgcaccggctgttcaggcgattccggaccgtcgcaaagccattgaaatcgcacgtcgcgctaatgatttcctggcagaagaagttgctaaacgtccggaccgctttctggcattcgcagcactgccgatgcaggatgtggacgcagcttccgaagaactgcaacgttgtgtcaacgatctgggcttcgtgggtgcgatggttaatggctttagcgtggaaggcgatggtcaaaccccgctgtattacgacctgccgcagtatcgcccgttctggaaagaagtcgaaaaactggatgtgccgttttatctgcatccgcgtaacccgctgccgcaggattcccgtatctacgacggtcacccgtggctgctgggtccgacctgggcgttcgcccaagaaacggcggtgcatgccctgcgtctgatggcatctggcctgtttgatgaacacccgggtctgaacattatcctgggtcatctgggcgaaggtctgccgtacatgatgtaccgtatcgatcatcgtatcgcatgggttaaagctccgccggattatccggcaaaacgtcgctttatggactacttcaacgaaaattttcacattaccacgtcaggcaacttccgtacccagacgctgattgatgcaatcctggaaattggtgctgatcgcatcctgttctcgaccgactggccgtttgaaaacattgatcatgccgctgactggtttaatgctacgtctattgccgaagctgaccgtgtcaaaatcggccgcaccaatgcccgtcgtctgttcaaactggatggccgt

SEQ ID NO: 899 - DNA, 984 bp, Artificial Sequence
  synthetic construct; Dicamba decarboxylase variant
atggctcaaggcaaagtggcactggaagaacatttcgcaatcccggaaacgctgcaagacgccgcaggtttcgtcccgggcgactactggaaagaactgcagcatcgtctgctggatatccaagacactcgcctgaaactgatggataaacacgagatcgaaacgatgattctgtccctggctgcaccgggtgttcaggcgattccggaccgtcgcaaagccattgaaatcgcacgtcgcgctaatgatttcctggcagaagaagttgctaaacgtccggaccgctttctggcattcgcagcactgccgctgcaggatccggacgcagctaccgaagaactgcaacgttgtgtcaacgatctgggcttcgtgggtgcgatggttaatggctttagcgtggaaggcgatggtcaaaccccgctgtattacgacctgccgcagtatcgcccgttctggggtgaagtcgaaaaactggatgtgccgttttatctgcatccgcgtaacccgctgccgcaggattcccgtatctacgacggtcacccgtggctgctgggtccgacctgggcgttcgcccaagaaacggcggtgcatgccctgcgtctgatggcatctggcctgtttgatgaacacccgcgtctgaacattatcctgggtcatctgggcgaaggtctgccgtacatgatgtaccgtatcgatcatcgtatcggatgggttaaagctccgccggattatccggcaaaacgtcgctttatggactacttcaacgaaaattttcacattaccacgtcaggcaacttccgtacccagacgctgattgatgcaatcctggaaattggtgctgatcgcatcctgttctcgaccgactggccgtttgaaaacattgatcatgccgctgcctggtttaatgctacgtctattgccgaagctgaccgtgtcaaaatcggccgcaccaatgcccgtcgtctgttcaaactggatggccgt

SEQ ID NO: 900 - DNA, 984 bp, Artificial Sequence
  synthetic construct; Dicamba decarboxylase variant
atggctcaaggcaaagtggcactggaagaacatttcgcaatcccggaaacgctgaacgacgccgcaggtttcgtcccgggcgactactggaaagaactgcagcatcgtctgctggatatccaagacactcgcctgaaactgatggataaacacgagatcggaacgatgattctgtccctggctgcaccggctgttcaggcgattccggaccgtcgcaaagccattgaaatcgcacgtcgcgctaatgatttcctggcagaagaagttgctaaacgtccggaccgctttctggcattcgcagcactgccgctgcaggatccggacgcagctaccgaagaactgcaacgttgtgtcaacgatctgggcttcgtgggtgccctggttaatggctttagccaggaaggcgatggtcaaaccccgctgtattacgacctgccgcagtatcgcccgttctggggtgaagtcgaaaaactggatgtgccgttttatctgcatccgcgtaacccgctgccgcaggattcccgtatctacgacggtcacccgtggctgctgggtccgacctgggcgttcgcccaagaaacggcggtgcatgccctgcgtctgatggcatctggcctgtttgatgaacacccgcgtctgaacattatcctgggtcatctgggcgaaggtctgccgtacatgatgtaccgtatcgatcatcgtatcgcatgggttaaagctccgccggattatccggcaaaacgtcgctttatggactacttcaacgaaaattttcacattaccacgtcaggcaacttccgtacccagacgctgattgatgcaatcctggaaattggtgctgatcgcatcctgttctcgaccgactggccgtttgaaaacattgatcatgccgctgactggtttaatgctacgtctattgccgaagctgaccgtgtcaaaatcggccgcaccaatgcccgtcgtctgttcaaactggatggccgt

SEQ ID NO: 901 - DNA, 984 bp, Artificial Sequence
  synthetic construct; Dicamba decarboxylase variant
atggctcaaggcaaagtggcactggaagaacatttcgcaatcccggaaacgctgcaagacgccgcaggtttcgtcccgggcgactactggaaagaactgcagcatcgtctgctggatatccaagacactcgcctgaaactgatggataaacacgagatcgaaacgatgattctgtccctggctgcaccggctgttcaggcgattccggaccttcgcaaagccattgaaatcgcacgtcgcgctaatgatttcctggcagaagaagttgctaaacgtccggaccgctttctggcattcgcagcactgccgctgcaggatccggacgcagctaccgaagaactgcaacgttgtgtcaacgatctgggcttcgtgggtgccctggttaatggctttagccaggaaggcgatggtcaaaccccgctgtattacgacctgccgcagtatcgcccgttctggggtgaagtcgaaaaactggatgtgccgttttatctgcatccgcgtaacccgctgccgcaggattcccgtatctacgacggtcacccgtggctgctgggtccgacctgggcgttcgcccaagaaacggcggtgcatgccctgcgtctgatggcatctggcctgtttgatgaacacccgcgtctgaacattatcctgggtcatctgggcgaaggtctgccgtacatgatgtaccgtatcgatcatcgtatcgcatgggttaaagctccgccggattatccggcaaaacgtcgctttatggactacttcctcgaaaattttcacattaccacgtcaggcaacttccgtacccagacgctgattgatgcaatcctggaaattggtgctgatcgcatcctgttctcgaccgactggccgtttgaaaacattgatcatgccgctgactggtttaatgctacgtctattgccgaagctgaccgtgtcaaaatcggccgcaccaatgcccgtcgtctgttcaaactggatctccgt

SEQ ID NO: 902 - DNA, 984 bp, Artificial Sequence
  synthetic construct; Dicamba decarboxylase variant
atggctcaaggcaaagtggcactggaagaacatttcgcaatcccggaaacgctgcaagacgccgcaggtttcgtcccgggcgactactggaaagaactgcagcatcgtctgctggatatccaagaccaacgcctgagactgatggataaacacgagatcggaacgatgattctgtccctggctgcaccggctgttcaggcgattccggaccgtcgcaaagccattgaaatcgcacgtcgcgctaatgatttcctggcagaagaagttgctaaacgtccggaccgctttctggcattcgcagcactgccgatgcaggatgtggacgcagcttccgaagaactgcaacgttgtgtcaacgatctgggcttcgtgggtgcgatggttaatggctttagccaggaaggcgatggtcaaaccccgctgtattacgacctgccgcagtatcgcccgttctggggtgaagtcgaaaaactggatgtgccgttttatctgcatccgcgtaacccgctgccgcaggattcccgtatctacgacggtcacccgtggctgctgggtccgacctgggcgttcgcccaagaaacggcggtgcatgccctgcgtctgatggcatctggcctgtttgatgaacacccgcgtctgaacattatcctgggtcatatgggcgaaggtctgccgtacatgatgtaccgtatcgatcatcgtatcggatgggttaaagctccgccggattatccggcaaaacgtcgctttatggactacttcctcgaaaattttcacattaccacgtcaggcaacttccgtacccagacgctgattgatgcaatcctggaaattggtgctgatcgcatcctgttctcgaccgactggccgtttgaaaacattgatcatgccgctgcctggtttaatgctacgtctattgccgaagctgaccgtgtcaaaatcggccgcaccaatgcccgtcgtctgttcaaactggatctccgt

SEQ ID NO: 903 - DNA, 984 bp, Artificial Sequence
  synthetic construct; Dicamba decarboxylase variant
atgggataaggcaaagtggcactggaagaacatttcgcaatcccggaaacgctgcaagacgccgcaggtttcgtcccgagcgactactggaaagaactgcagcatcgtctgctggatatccaagacactcgcctgaaactgatggataaacacgagatcgaaacgatgattctgtccctggctgcaccggctgttcaggcgattccggaccgtcgcaaagccattgaaatcgcacgtcgcgctaatgatttcctggcagaagaagttgctaaacgtccggaccgctttctggcattcgcagcactgccgctgcaggatccggacgcagctaccgaagaactgcaacgttgtgtcaacgatctgggcttcgtgggtgccctggttaatggctttagcgtggaaggcgatggtcaaaccccgctgtattacgacctgccgcagtatcgcccgttctggggtgaagtcgaaaaactggatgtgccgttttatctgcatccgcgtaacccgctgccgcaggattcccgtatctacgacggtcacccgtggctgctgggtccgacctgggcgttcgcccaagaaacggcggtgcatgccctgcgtctgatggcatctggcctgtttgatgaacacccgcgtctgaacattatcctgggtcatatgggcgaaggtctgccgtacatgatgtaccgtatcgatcatcgtatcggatgggttaaagctccgccggattatccggcaaaacgtcgctttatggactacttcctcgaaaattttcacattaccacgtcaggcaacttccgtacccagacgctgattgatgcaatcctggaaattggtgctgatcgcatcctgttctcgaccgactggccgtttgaaaacattgatcatgccgctgcctggtttaatgctacgtctattgccgaagctgaccgtctcaaaatcggccgcaccaatgcccgtcgtctgttcaaactggatggccgt

SEQ ID NO: 904 - DNA, 984 bp, Artificial Sequence
  synthetic construct; Dicamba decarboxylase variant
atggctcaaggcaaagtggcactggaagaacatttcgcaatcccggaaacgctgcaagacgccgcagatttcgtcccgggcgactactggaaagaactgcagcatcgtctgctggatatccaagaccaacgcctgagactgatggataaacacgagatcggaacgatgattctgtccctggctgcaccggctgttcaggcgattccggaccgtcgcaaagccattgaaatcgcacgtcgcgctaatgatttcctggcagaagaagttgctaaacgtccggaccgctttctggcattcgcagcactgccgatgcaggatgtggacgcagctaccgaagaactgcaacgttgtgtcaacgatctgggcttcgtgggtgccctggttaatggctttagccaggaaggcgatggtcaaaccccgctgtattacgacctgccgcagtatcgcccgttctggggtgaagtcgaaaaactggatgtgccgttttatctgcatccgcgtaacccgctgccgcaggattcccgtatctacgacggtcacccgtggctgctgggtccgacctgggcgttcgcccaagaaacggcggtgcatgccctgcgtctgatggcatctggcctgtttgatgaacacccgggtctgaacattatcctgggtcatctgggcgaaggtctgccgtacatgatgtaccgtatcgatcatcgtatcgcatgggttaaagctccgccggattatccggcaaaacgtcgctttatggactacttcaacgaaaattttcacattaccacgtcaggcaacttccgtacccagacgctgattgatgcaatcctggaaattggtgctgatcgcatcctgttctcgaccgactggccgtttgaaaacattgatcatgccgctgactggtttaatgctacgtctattgccgaagctgaccgtgtcaaaatcggccgcaccaatgcccgtcgtctgttcaaactggatggccgt

SEQ ID NO: 905 - DNA, 984 bp, Artificial Sequence
  synthetic construct; Dicamba decarboxylase variant
atggctcaaggcaaagtggcactggaagaacatttcgcaatcccggaaacgctgcaagacgccgcaggtttcgtcccgggcgactactggaaagaactgcagcatcgtctgctggatatccaagacactcgcctgaaactgatggataaacacgagatcgaaacgatgattctgtccctggctgcaccgggtgttcaggcgattccggaccgtcgcaaagccattgaaatcgcacgtcgcgctaatgatttcctggcagaagaagttgctaaacgtccggaccgctttctggcattcgcagcactgccgctgcaggatccggacgcagctaccgaagaactgcaacgttgtgtcaacgatctgggcttcgtgggtgcgatggttaatggctttagcgtggaaggcgatggtcaaaccccgctgtattacgacctgccgcagtatcgcccgttctggggtgaagtcgaaaaactggatgtgccgttttatctgcatccgcgtaacccgctgccgcaggattcccgtatctacgacggtcacccgtggctgctgggtccgacctgggcgttcgcccaagaaacggcggtgcatgccctgcgtctgatggcatctggcctgtttgatgaacacccgggtctgcaaattatcctgggtcatatgggcgaaggtctgccgtacatgatgtaccgtatcgatcatcgtatcgcatgggttaaagctccgccggattatccggcaaaacgtcgctttatggactacttcctcgaaaattttcacattaccacgtcaggcaacttccgtacccagacgctgattgatgcaatcctggaaattggtgctgatcgcatcctgttctcgaccgactggccgtttgaaaacattgatcatgccgctgcctggtttgcagagacgtctattgccgaagctgaccgtctcaaaatcggccgcaccaatgcccgtcgtctgttcaaactggatggccgt

SEQ ID NO: 906 - DNA, 984 bp, Artificial Sequence
  synthetic construct; Dicamba decarboxylase variant
atggctcaaggcaaagtggcactggaagaacatttcgcaatcccggaaacgctgcaagacgccgcaggtttcgtcccgggcgactactggaaagaactgcagcatcgtctgctggatatccaagacactcgcctgaaactgatggataaacacgagatcgaaacgatgattctgtccctggctgcaccggctgttcaggcgattccggaccgtcgcaaagccattgaaatcgcacgtcgcgctaatgatttcctggcagaagaagttgctaaacgtccggaccgctttctggcattcgcagcactgccgatgcaggatccggacgcagctaccgaagaactgcaacgttgtgtcaacgatctgggcttcgtgggtgcgatggttaatggctttagcgtggaaggcgatggtcaaaccccgctgtattacgacctgccgcagtatcgcccgttctggggtgaagtcgaaaaactggatgtgccgttttatctgcatccgcgtaacccgctgccgcaggattcccgtatctacgacggtcacccgtggctgctgggtccgacctgggcgttcgcccaagaaacggcggtgcatgccctgcgtctgatggcatctggcctgtttgatgaacacccgggtctgcaaattatcctgggtcatatgggcgaaggtctgccgtacatgatgtaccgtatcgatcatcgtatcggatgggttcaagctccgccggattatccggcaaaacgtcgctttatggactacttcctcgaaaattttcacattaccacgtcaggcaacttccgtacccagacgctgattgatgcaatcctggaaattggtgctgatcgcatcctgttctcgaccgactggccgtttgaaaacattgatcatgccgctgactggtttaatgctacgtctattgccgaagctgaccgtgtcaaaatcggccgcaccaatgcccgtcgtctgttcaaactggatggccgt

SEQ ID NO: 907 - DNA, 984 bp, Artificial Sequence
  synthetic construct; Dicamba decarboxylase variant
atggctcaaggcaaagtggcactggaagaacatttcgcaatcccggaaacgctgcaagacgccgcaggtttcgtcccgggcgactactggaaagaactgcagcatcgtctgctggatatccaagacactcgcctgaaactgatggataaacacgagatcggaacgatgattctgtccctggctgcaccggctgttcaggcgattccggaccgtgtcaaagccattgaaatcgcacgtcgcgctaatgatttcctggcagaagaagttgctaaacgtccggaccgctttctggcattcgcagcactgccgctgcaggatccggacgcagctaccgaagaactgcaacgttgtgtcaacgatctgggcttcgtgggtgcgatggttaatggctttagccaggaaggcgatggtcaaaccccgctgtattacgacctgccgcagtatcgcccgttctggggtgaagtcgaaaaactggatgtgccgttttatctgcatccgcgtaacccgctgccgcaggattcccgtatctacgacggtcacccgtggctgctgggtccgacctgggcgttcgcccaagaaacggcggtgcatgccctgcgtctgatggcatctggcctgtttgatgaacacccgcgtctgaacattatcctgggtcatatgggcgaaggtctgccgtacatgatgtaccgtatcgatcatcgtatcgcatgggttaaagctccgccggattatccggcaaaacgtcgctttatggactacttcctcgaaaattttcacattaccacgtcaggcaacttccgtacccagacgctgattgatgcaatcctggaaattggtgctgatcgcatcctgttctcgaccgactggccgtttgaaaacattgatcatgccgctgactggtttaatgctacgtctattgccgaagctgaccgtgtcaaaatcggccgcaccaatgcccgtcgtctgttcaaactggatggccgt

SEQ ID NO: 908 - DNA, 984 bp, Artificial Sequence
  synthetic construct; Dicamba decarboxylase variant
atggctcaaggcaaagtggcactggaagaacatttcgcaatcccggaaacgctgcaagacgccgcaggtttcgtcccgggcgactactggaaagaactgcagcatcgtctgctggatatccaagacactcgcctgaaactgatggataaacacgagatcgaaacgatgattctgtccctggctgcaccggctgttcaggcgattccggaccgtcgcaaagccgttgaaatcgcacgtcgcgctaatgatttcctggcagaagaagttgctaaacgtccggaccgctttctggcattcgcagcactgccgctgcaggatccggacgcagctaccgaagaactgcaacgttgtgtcaacgatctgggcttcgtgggtgcgatggttaatggctttagccaggaaggcgatggtcaaaccccgctgtattacgacctgccgcagtatcgcccgttctggggtgaagtcgaaaaactggatgtgccgttttatctgcatccgcgtaacccgctgccgcaggattcccgtatctacgacggtcacccgtggctgctgggtccgacctgggcgttcgcccaagaaacggcggtgcatgccctgcgtctgatggcatctggcctgtttgatgaacacccgcgtctgaacattatcctgggtcatatgggcgaaggtctgccgtacatgatgtaccgtatcgatcatcgtatcgcatgggttaaagctccgccggattatccggcaaaacgtcgctttatggactacttcctcgaaaattttcacattaccacgtcaggcaacttccgtacccagacgctgattgatgcaatcctggaaattggtgctgatcgcatcctgttctcgaccgactggccgtttgaaaacattgatcatgccgctgactggtttaatgctacgtctattgccgaagctgaccgtgtcaaaatcggccgcaccaatgcccgtcgtctgttcaaactggacggccgt

SEQ ID NO: 909 - DNA, 984 bp, Artificial Sequence
  synthetic construct; Dicamba decarboxylase variant
atggctcaaggcaaagtggcactggaagaacatttcgcaatcccggaaacgctgaacgacgccgcaggtttcgtcccgggcgactactggaaagaactgcagcatcgtctgctggatatccaagacactcgcctgaaactgatggataaacacgagatcgaaacgatgattctgtccctggctgcaccggctgttcaggcgattccggaccgtcgcaaagccattgaaatcgcacgtcgcgctaatgatttcctggcagaagaagttgctaaacgtccggaccgctttctggcattcgcagcactgccgctgcaggatccggacgcagctaccgaagaactgcaacgttgtgtcaacgatctgggcttcgtgggtgcgatggttaatggctttagccaggaaggcgatggtcaaaccccgctgtattacgacctgccgcagtatcgcccgttctggggtgaagtcgaaaaactggatgtgccgttttatctgcatccgcgtaacccgctgccgcaggattcccgtatctacgacggtcacccgtggctgctgggtccgacctgggcgttcgcccaagaaacggcggtgcatgccctgcgtctgatggcatctggcctgtttgatgaacacccgcgtctgaacattatcctgggtcatatgggcgaaggtctgccgtacatgatgtaccgtatcgatcatcgtatcgcatgggttaaagctccgccggattatccggcaaaacgtcgctttatggactacttcctcgaaaattttcacattaccacgtcaggcaacttccgtacccagacgctgattgatgcaatcctggaaattggtgctgatcgcatcctgttctcgaccgactggccgtttgaaaacattgatcatgccgctgactggtttaatgctacgtctattgccgaagctgaccgcgtcaaaatcggccgcaccaatgcccgtcgtctgttcaaactggatggccgt

SEQ ID NO: 910 - DNA, 984 bp, Artificial Sequence
  synthetic construct; Dicamba decarboxylase variant
atggctcaaggcaaagtggcactggaagaacatttcgcaatcccggaaacgctgcaagacgccgcaggtttcgtcccgggcgactactggaaagaactgcagcatcgtctgctggatatccaagacactcgcctgaaactgatggataaacacgagatcggaacgatgattctgtccctggctgcaccggctgttcaggcgattccggaccgtcgcaaagccattgaaatcgcacgtcgcgctaatgatttcctggcagaagaagttgctaaacgtccggaccgctttctggcattcgcagcactgccgctgcaggatccggacgcagctaccgaagaactgcaacgttgtgtcaacgatctgggcttcgtgggtgcgatggttaatggctttagccaggaaggcgatggtcaaaccccgctgtattacgacctgccgcagtatcgcccgttctggggtgaagtcgaaaaactggatgtgccgttttatctgcatccgcgtaacccgctgccgcaggattcccgtatctacgacggtcacccgtggctgctgggtccgacctgggcgttcgcccaagaaacggcggtgcatgccctgcgtctgatggcatctggcctgtttgatgaacacccgcgtctgaacattatcctgggtcatatgggcgaaggtctgccgtacatgatgtaccgtatcgatcatcgtatcgcatgggttaaagctccgccggattatccggcaaaacgtcgctttatggactacttcctcgaaaattttcacattaccacgtcaggcaacttccgtacccagacgctgattgatgcaatcctggaaattggtgctgatcgcatcctgttctcgaccgactggccgtttgaaaacattgatcatgccgctgactggtttaatgctacgtctattgccgaagctgaccgtgtcaaaatcggccgcaccaatgcccgtcgtctgttcaaactggatggccgt

SEQ ID NO: 911 - DNA, 984 bp, Artificial Sequence
  synthetic construct; Dicamba decarboxylase variant
atggctcaaggcaaagtggcactggaagaacatttcgcaatcccggaaacgctgcaagacgccgcaggtttcgtcccgggcgactactggaaagaactgcagcatcgtctgctggatatccaagacactcgcctgaaactgatggataaacacgagatcgaaacgatgattctgtccctggctgcaccggctgttcaggcgattccggaccgtcgcaaagccattgaaatcgcacgtcgcgctaatgatttcctggcagaagaagttgctaaacgtccggaccgctttctggcattcgcagcactgccgatgcaggatccggacgcagctaccgaagaactgcaacgttgtgtcaacgatctgggcttcgtgggtgcgatggttaatggctttagccaggaaggcgatggtcaaaccccgctgtattacgacctgccgcagtatcgcccgttctggggtgaagtcgaaaaactggatgtgccgttttatctgcatccgcgtaacccgctgccgcaggattcccgtatctacgacggtcacccgtggctgctgggtccgacctgggcgttcgcccaagaaacggcggtgcatgccctgcgtctgatggcatctggcctgtttgatgaacacccgggtctgaacattatcctgggtcatctgggcgaaggtctgccgtacatgatgtaccgtatcgatcatcgtatcgcatgggttaaagctccgccggattatccggcaaaacgtcgctttatggactacttcaacgaaaattttcacattaccacgtcaggcaacttccgtacccagacgctgattgatgcaatcctggaaattggtgctgatcgcatcctgttctcgaccgactggccgtttgaaaacattgatcatgccgctgcctggtttaatgctacgtctattgccgaagctgaccgtctcaaaatcggccgcaccaatgcccgtcgtctgttcaaactggatggccgt

SEQ ID NO: 912 - DNA, 984 bp, Artificial Sequence
  synthetic construct; Dicamba decarboxylase variant
atggctcaaggcaaagtggcactggaagaacatttcgcaatcccggcaacgctgaacgacgccgcaggtttcgtcccgggcgactactggaaagaactgcagcatcgtctgctggatatccaagacactcgcctgaaactgatggataaacacgagatcgaaacgatgattctgtccctggctgcaccggctgttcaggcgattccggaccgtcgcaaagccattgaaatcgcacgtcgcgctaatgatttcctggcagaagaagttgctaaacgtccggaccgctttctggcattcgcagcactgccgctgcaggatccggacgcagctaccgaagaactgcaacgttgtgtcaacgatctgggcttcgtgggtgcgatggttaatggctttagcgtggaaggcgatggtcaaaccccgctgtattacgacctgccgcagtatcgcccgttctggggtgaagtcgaaaaactggatgtgccgttttatctgcatccgcgtaacccgctgccgcaggattcccgtatctacgacggtcacccgtggctgctgggtccgacctgggcgttcgcccaagaaacggcggtgcatgccctgcgtctgatggcatctggcctgtttgatgaacacccgggtctgcaaattatcctgggtcatctgggcgaaggtctgccgtacatgatgtaccgtatcgatcatcgtatcggatgggttcaagctccgccggattatccggcaaaacgtcgctttatggactacttcctcgaaaattttcacattaccacgtcaggcaacttccgtacccagacgctgattgatgcaatcctggaaattggtgctgatcgcatcctgttctcgaccgactggccgtttgaaaacattgatcatgccgctgcctggtttgcagagacgtctattgccgaagctgaccgtgtcaaaatcggccgcaccaatgcccgtcgtctgttcaaactggatggccgt

SEQ ID NO: 913 - DNA, 984 bp, Artificial Sequence
  synthetic construct; Dicamba decarboxylase variant
atggctcaaggcaaagtggcactggaagaacatttcgcaatcccggaaacgctgcaagacgccgcaggtttcgtcccgggcgactactggaaagaactgcagcatcgtctgctggatatccaagacactcgcctgaaactgatggataaacacgagatcgaaacgatgattctgtccctggctgcaccggctgttcaggcgattccggaccgtcgcaaagccattgaaatcgcacgtcgcgctaatgatttcctggcagaagaagttgctaaacgtccggaccgctttctggcattcgcagcactgccgctgcaggatccggacgcagctaccgaagaactgcaacgttgtgtcaacgatctgggcttcgtgggtgccctggttaatggctttagccaggaaggcgatggtcaaaccccgctgtattacgacctgccgcagtatcgcccgttctggggtgaagtcgaaaaactggatgtgccgttttatctgcatccgcgtaacccgctgccgcaggattcccgtatctacgacggtcacccgtggctgctgggtccgacctgggcgttcgcccaagaaacggcggtgcatgccctgcgtctgatggcatctggcctgtttgatgaacacccgcgtctgaacattatcctgggtcatatgggcgaaggtctgccgtacatgatgtaccgtatcgatcatcgtatcggatgggttcaagctccgccggattatccggcaaaacgtcgctttatggactacttcctcgaaaattttcacattaccacgtcaggcaacttccgtacccagacgctgattgatgcaatcctggaaattggtgctgatcgcatcctgttctcgaccgactggccgtttgaaaacattgatcatgccgctgcctggtttgcagagacgtctattgccgaagctgaccgtctcaaaatcggccgcaccaatgcccgtcgtctgttcaaactggatggccgt

SEQ ID NO: 914 - DNA, 984 bp, Artificial Sequence
  synthetic construct; Dicamba decarboxylase variant
atggctcaaggcaaagtggcactggaagaacatttcgcaatcccggaaacgctgcaagacgccgcaggtttcgtcccgggcgactactggaaagaactgcagcatcgtctgctggatatccaagacactcgcctgaaactgatggataaacacgagatcgaaacgatgattctgtccctggctgcaccggctgttcaggcgattccggaccgtgtcaaagccattgaaatcgcacgtcgcgctaatgatttcctggcagaagaagttgctaaacgtccggaccgctttctggcattcgcagcactgccgctgcaggatgtggacgcagctaccgaagaactgcaacgttgtgtcaacgatctgggcttcgtgggtgcgatggttaatggctttagccaggaaggcgatggtcaaaccccgctgtattacgacctgccgcagtatcgcccgttctggggtgaagtcgaaaaactggatgtgccgttttatctgcatccgcgtaacccgctgccgcaggattcccgtatctacgacggtcacccgtggctgctgggtccgacctgggcgttcgcccaagaaacggcggtgcatgccctgcgtctgatggcatctggcctgtttgatgaacacccgcgtctgaacattatcctgggtcatatgggcgaaggtctgccgtacatgatgtaccgtatcgatcatcgtatcgcatgggttaaagctccgccggattatccggcaaaacgtcgctttatggactacttcaacgaaaattttcacattaccacgtcaggcaacttccgtacccagacgctgattgatgcaatcctggaaattggtgctgatcgcatcctgttctcgaccgactggccgtttgaaaacattgatcatgccgctgactggtttaatgctgcgtctattgccgaagctgaccgtgtcaaaatcggccgcaccaatgcccgtcgtctgttcaaactggatggccgt

SEQ ID NO: 915 - DNA, 984 bp, Artificial Sequence
  synthetic construct; Dicamba decarboxylase variant
atggctcaaggcaaagtggcactggaagaacatttcgcaatcccggaaacgctgcaagacgccgcaggtttcgtcccgggcgactactggaaagaactgcagcatcgtctgctggatatccaagacactcgcctgaaactgatggataaacacgagatcgaaacgatgattctgtccctggctgcaccggctgttcaggcgattccggaccgtgtcaaagccattgaaatcgcacgtcgcgctaatgatttcctggcagaagaagttgctaaacgtccggaccgctttctggcattcgcagcactgccgctgcaggatccggacgcagctaccgaagaactgcaacgttgtgtcaacgatctgggcttcgtgggtgcgatggtcaatggctttagccaggaaggcgatggtcaaaccccgctgtattacgacctgccgcagtatcgcccgttctggggtgaagtcgaaaaactggatgtgccgttttatctgcatccgcgtaacccgctgccgcaggattcccgtatctacgacggtcacccgtggctgctgggtccgacctgggcgttcgcccaagaaacggcggtgcatgccctgcgtctgatggcatctggcctgtttgatgaacacccgcgtctgaacattatcctgggtcatatgggcgaaggtctgccgtacatgatgtaccgtatcgatcatcgtatcgcatgggttaaagctccgccggattatccggcaaaacgtcgctttatggactacttcctcgaaaattttcacattaccacgtcaggcaacttccgtacccagacgctgattgatgcaatcctggaaattggtgctgatcgcatcctgttctcgaccgactggccgtttgaaaacattgatcatgccgctgactggtttaatgctacgtctattgccgaagctgaccgtgtcaaaatcggccgcaccaatgcccgtcgtctgttcaaactgggtggccgt

SEQ ID NO: 916 - DNA, 984 bp, Artificial Sequence
  synthetic construct; Dicamba decarboxylase variant
atggctcaaggcaaagtggcactggaagaacatttcgcaatcccggaaacgctgcaagacgccgcagatttcgtcccgggcgactactggaaagaactgcagcatcgtctgctggatatccaagacactcgcctgaaactgatggataaacacgagatcgaaacgatgattctgtccctggctgcaccggctgttcaggcgattccggaccgtcgcaaagccattgaaatcgcacgtcgcgctaatgatttcctggcagaagaagttgctaaacgtccggaccgctttctggcattcgcagcactgccgctgcaggatgtggacgcagctaccgaagaactgcaacgttgtgtcaacgatctgggcttcgtgggtgcgatggttaatggctttagccaggaaggcgatggtcaaaccccgctgtattacgacctgccgcagtatcgcccgttctggggtgaagtcgaaaaactggatgtgccgttttatctgcatccgcgtaacccgctgccgcaggattcccgtatctacgacggtcacccgtggctgctgggtccgacctgggcgttcgcccaagaaacggcggtgcatgccctgcgtctgatggcatctggcctgtttgatgaacacccgcgtctgaacattatcctgggtcatatgggcgaaggtctgccgtacatgatgtaccgtatcgatcatcgtatcgcatgggttaaagctccgccggattatccggcaaaacgtcgctttatggactacttcaacgaaaattttcacattaccacgtcaggcaacttccgtacccagacgctgattgatgcaatcctggaaattggtgctgatcgcatcctgttctcgaccgactggccgtttgaaaacattgatcatgccgctgactggtttaatgctacgtctattgccgaagctgaccgtgtcaaaatcggccgcaccaatgcccgtcgtctgttcaaactggatggccgt

SEQ ID NO: 917 - DNA, 984 bp, Artificial Sequence
  synthetic construct; Dicamba decarboxylase variant
atggctcaaggcaaagtggcactggaagaacatttcgcaatcccggaaacgctgcaagacgccgcaggtttcgtcccgggcgactactggaaagaactgcagcatcgtctgctggatatccaagacactcgcctgaaactgatggataaacacgagatcgaaacgatgattctgtccctggctgcaccggctgttcaggcgattccggaccgtcgcaaagccattgaaatcgcacgtcgcgctaatgatttcctggcagaagaagttgctaaacgtccggaccgctttctggcattcgcagcactgccgctgcaggatgtggacgcagctaccgaagaactgcaacgttgtgtcaacgatctgggcttcgtgggtgcgatggttaatggctttagccaggaaggcgatggtcaaaccccgctgtattacgacctgccgcagtatcgcccgttctggggtgaagtcgaaaaactggatgtgccgttttatctgcatccgcgtaacccgctgccgcaggattcccgtatctacgacggtcacccgtggctgctgggtccgacctgggcgttcgcccaagaaacggcggtgcatgccctgcgtctgatggcatctggcctgtttgatgaacacccgcgtctgaacattatcctgggtcatatgggcgaaggtctgccgtacatgatgtaccgtatcgatcatcgtatcgcatgggttaaagctccgccggattatccggcaaaacgtcgctttatggactacttcctcgaaaattttcacattaccacgtcaggcaacttccgtacccagacgctgattgatgcaatcctggaaattggtgctgatcgcatcctgttctcgaccgactggccgtttgaaaacattgatcatgccgctgactggtttaatgctacgtctattgccgaagctgaccgtgtcaaaatcggccgcaccaatgcccgtcgtctgttcaaactggatggccgt

SEQ ID NO: 918 - DNA, 984 bp, Artificial Sequence
  synthetic construct; Dicamba decarboxylase variant
atggctcaaggcaaagtggcactggaagaacatttcgcaatcccggaaacgctgaacgacgccgcaggtttcgtcccgagcgactactggaaagaactgcagcatcgtctgctggatatccaagacactcgcctgaaactgatggataaacacgagatcgaaacgatgattctgtccctggctgcaccggctgttcaggcgattccggaccgtgtcaaagccattgaaatcgcacgtcgcgctaatgatttcctggcagaagaagttgctaaacgtccggaccgctttctggcattcgcagcactgccgctgcaggatccggacgcagctaccgaagaactgcaacgttgtgtcaacgatctgggcttcgtgggtgccctggttaatggctttagccaggaaggcgatggtcaaaccccgctgtattacgacctgccgcagtatcgcccgttctggggtgaagtcgaaaaactggatgtgccgttttatctgcatccgcgtaacccgctgccgcaggattcccgtatctacgacggtcacccgtggctgctgggtccgacctgggcgttcgcccaagaaacggcggtgcatgccctgcgtctgatggcatctggcctgtttgatgaacacccgcgtctgaacattatcctgggtcatatgggcgaaggtctgccgtacatgatgtaccgtatcgatcatcgtatcgcatgggttaaagctccgccggattatccggcaaaacgtcgctttatggactacttcctcgaaaattttcacattaccacgtcaggcaacttccgtacccagacgctgattgatgcaatcctggaaattggtgctgatcgcatcctgttctcgaccgactggccgtttgaaaacattgatcatgccgctgactggtttaatgctacgtctattgccgaagctgaccgtgtcaaaatcggccgcaccaatgcccgtcgtctgttcaaactggatggccgt

SEQ ID NO: 919 - DNA, 984 bp, Artificial Sequence
  synthetic construct; Dicamba decarboxylase variant
atggctcaaggcaaagtggcactggaagaacatttcgcaatcccggaaacgctgaacgacgccgcagatttcgtcccgggcgactactggaaagaactgcagcatcgtctgctggatatccaagacactcgcctgaaactgatggataaacacgagatcgaaacgatgattctgtccctggctgcaccggctgttcaggcgattccggaccgtcgcaaagccattgaaatcgcacgtcgcgctaatgatttcctggcagaagaagttgctaaacgtccggaccgctttctggcattcgcagcactgccgctgcaggatccggacgcagctaccgaagaactgcaacgttgtgtcaacgatctgggcttcgtgggtgcgatggttaatggctttagccaggaaggcgatggtcaaaccccgctgtattacgacctgccgcagtatcgcccgttctggggtgaagtcgaaaaactggatgtgccgttttatctgcatccgcgtaacccgctgccgcaggattcccgtatctacgacggtcacccgtggctgctgggtccgacctgggcgttcgcccaagaaacggcggtgcatgccctgcgtctgatggcatctggcctgtttgatgaacacccgcgtctgaacattatcctgggtcatatgggcgaaggtctgccgtacatgatgtaccgtatcgatcatcgtatcgcatgggttaaagctccgccggattatccggcaaaacgtcgctttatggactacttcaacgaaaattttcacattaccacgtcaggcaacttccgtacccagacgctgattgatgcaatcctggaaattggtgctgatcgcatcctgttctcgaccgactggccgtttgaaaacattgatcatgccgctgactggtttaatgctacgtctattgccgaagctgaccgtgtcaaaatcggccgcaccaatgcccgtcgtctgttcaaactggatggccgt

SEQ ID NO: 920 - DNA, 984 bp, Artificial Sequence
  synthetic construct; Dicamba decarboxylase variant
atggctcaaggcaaagtggcactggaagaacatttcgcaatcccggaaacgctgaacgacgccgcaggtttcgtcccgggcgactactggaaagaactgcagcatcgtctgctggatatccaagacactcgcctgaaactgatggataaacacgagatcgaaacgatgattctgtccctggctgcaccggctgttcaggcgattccggaccgtgtcaaagccattgaaatcgcacgtcgcgctaatgatttcctggcagaagaagttgctaaacgtccggaccgctttctggcattcgcagcactgccgctgcaggatccggacgcagctaccgaagaactgcaacgttgtgtcaacgatctgggcttcgtgggtgcgatggttaatggctttagccaggaaggcgatggtcaaaccccgctgtattacgacctgccgcagtatcgcccgttctggggtgaagtcgaaaaactggatgtgccgttttatctgcatccgcgtaacccgctgccgcaggattcccgtatctacgacggtcacccgtggctgctgggtccgacctgggcgttcgcccaagaaacggcggtgcatgccctgcgtctgatggcatctggcctgtttgatgaacacccgcgtctgaacattatcctgggtcatatgggcgaaggtctgccgtacatgatgtaccgtatcgatcatcgtatcgcatgggttaaagctccgccggattatccggcaaaacgtcgctttatggactacttcaacgaaaattttcacattaccacgtcaggcaacttccgtacccagacgctgattgatgcaatcctggaaattggtgctgatcgcatcctgttctcgaccgactggccgtttgaaaacattgatcatgccgctgactggtttaatgctacgtctattgccgaagctgaccgtgtcaaaatcggccgcaccaatgcccgtcgtctgttcaaactggatggccgt

SEQ ID NO: 921 - DNA, 984 bp, Artificial Sequence
  synthetic construct; Dicamba decarboxylase variant
atggctcaaggcaaagtggcactggaagaacatttcgcaatcccggaaacgctggacgacgccgcaggtttcgtcccgggcgactactggaaagaactgcagcatcgtctgctggatatccaagacactcgcctgaaactgatggataaacacgagatcgaaacgatgattctgtccctggctgcaccggctgttcaggcgatcccggaccgtgtcaaagccattgaaatcgcacgtcgcgctaatgatttcctggcagaagaagttgctaaacgtccggaccgctttctggcattcgcagcactgccgctgcaggatccggacgcagctaccgaagaactgcaacgttgtgtcaacgatctgggcttcgtgggtgcgatggttaatggctttagccaggaaggcgatggtcaaaccccgctgtattacgacctgccgcagtatcgcccgttctggggtgaagtcgaaaaactggatgtgccgttttatctgcatccgcgtaacccgctgccgcaggattcccgtatctacgacggtcacccgtggctgctgggtccgacctgggcgttcgcccaagaaacggcggtgcatgccctgcgtctgatggcatctggcctgtttgatgaacacccgcgtctgaacattatcctgggtcatatgggcgaaggtctgccgtacatgatgtaccgtatcgatcatcgtatcgcatgggttaaagctccgccggattatccggcaaaacgtcgctttatggactacttcaacgaaaattttcacattaccacgtcaggcaacttccgtacccagacgctgattgatgcaatcctggaaattggtgctgatcgcatcctgttctcgaccgactggccgtttgaaaacattgatcatgccgctgactggtttaatgctacgtctattgccgaagctgaccgtgtcaaaatcggccgcaccaatgcccgtcgtctgttcaaactggatggccgt

SEQ ID NO: 922 - DNA, 984 bp, Artificial Sequence
  synthetic construct; Dicamba decarboxylase variant
atggctcaaggcaaagtggcactggaagaacatttcgcaatcccggaaacgctgaacgacgccgcaggtttcgtcccgggcgactactggaaagaactgcagcatcgtctgctggatatccaagacactcgcctgaaactgatggataaacacgagatcgaaacgatgattctgtccctggctgcaccggctgttcaggcgattccggaccgtgtcaaagccattgaaatcgcacgtcgcgctaatgatttcctggcagaagaagttgctaaacgtccggaccgctttctggcattcgcagcactgccgctgcaggatgtggacgcagctaccgaagaactgcaacgttgtgtcaacgatctgggcttcgtgggtgcgatggttaatggctttagccaggaaggcgatggtcaaaccccgctgtattacgacctgccgcagtatcgcccgttctggggtgaagtcgaaaaactggatgtgccgttttatctgcatccgcgtaacccgctgccgcaggattcccgtatctacgacggtcacccgtggctgctgggtccgacctgggcgttcgcccaagaaacggcggtgcatgccctgcgtctgatggcatctggcctgtttgatgaacacccgcgtctgaacattatcctgggtcatatgggcgaaggtctgccgtacatgatgtaccgtatcgatcatcgtatcgcatgggttaaagctccgccggattatccggcaaaacgtcgctttatggactacttcctcgaaaattttcacattaccacgtcaggcaacttccgtacccagacgctgattgatgcaatcctggaaattggtgctgatcgcatcctgttctcgaccgactggccgtttgaaaacattgatcatgccgctgactggtttaatgctacgtctattgccgaagctgaccgtgtcaaaatcggccgcaccaatgcccgtcgtctgttcaaactggatggccgt

SEQ ID NO: 923 - DNA, 984 bp, Artificial Sequence
  synthetic construct; Dicamba decarboxylase variant
atggctcaaggcaaagtggcactggaagaacatttcgcaatcccggaaacgctgcaagacgccgcaggtttcgtcccgggcgactactggaaagaactgcagcatcgtctgctggatatccaagacactcgcctgaaactgatggataaacacgagatcggaacgatgattctgtccctggctgcaccggctgttcaggcgattccggaccgtcgcaaagccattgaaatcgcacgtcgcgctaatgatttcctggcagaagaagttgctaaacgtccggaccgctttctggcattcgcagcactgccgctgcaggatccggacgcagctaccgaagaactgcaacgttgtgtcaacgatctgggcttcgtgggtgcgatggttaatggctttagccaggaaggcgatggtcaaaccccgctgtattacgacctgccgcagtatcgcccgttctggggtgaagtcgaaaaactggatgtgccgttttatctgcatccgcgtaacccgctgccgcaggattcccgtatctacgacggtcacccgtggctgctgggtccgacctgggcgttcgcccaagaaacggcggtgcatgccctgcgtctgatggcatctggcctgtttgatgaacacccgcgtctgaacattatcctgggtcatatgggcgaaggtctgccgtacatgatgtaccgtatcgatcatcgtatcgcatgggttaaagctccgccggattatccggcaaaacgtcgctttatggactacttcaacgaaaattttcacattaccacgtcaggcaacttccgtacccagacgctgattgatgcaatcctggaaattggtgctgatcgcatcctgttctcgaccgactggccgtttgaaaacattgatcatgccgctgactggtttaatgctacgtctattgccgaagctgaccgtgtcaaaatcggccgcaccaatgcccgtcgtctgttcaaactggatggccgt

SEQ ID NO: 924 - DNA, 984 bp, Artificial Sequence
  synthetic construct; Dicamba decarboxylase variant
atggctcaaggcaaagtggcactggaagagcatttcgcaatcccggaaacgctgcaagacgccgcaggtttcgtcccgggcgactactggaaagaactgcagcatcgtctgctggatatccaagacactcgcctgaaactgatggataaacacgagatcgaaacgatgattctgtccctggctgcaccggctgttcaggcgattccggaccgtcgcaaagccattgaaatcgcacgtcgcgctaatgatttcctggcagaagaagttgctaaacgtccggaccgctttctggcattcgcagcactgccgatgcaggatgtggacgcagctaccgaagaactgcaacgttgtgtccgcgatctgggcttcgtgggtgcgatggttaatggctttagccaggaaggcgatggtcaaaccccgctgtattacgacctgccgcagtatcgcccgttctggggtgaagtcgaaaaactggatgtgccgttttatctgcatccgcgtaacccgctgccgcaggattcccgtatctacgacggtcacccgtggctgctgggtccgacctgggcgttcgcccaagaaacggcggtgcatgccctgcgtctgatggcatctggcctgtttgatgaacacccgcgtctgaacattatcctgggtcatctgggcgaaggtctgccgtacatgatgtaccgtatcgatcatcgtatcgcatgggttaaagctccgccggattatccggcaaaacgtcgctttatggactacttcctcgaaaattttcacattaccacgtcaggcaacttccgtacccagacgctgattgatgcaatcctggaaattggtgctgatcgcatcctgttctcgaccgactggccgtttgaaaacattgatcatgccgctgactggtttaatgctacgtctattgccgaagctgaccgtgtcaaaatcggccgcaccaatgcccgtcgtctgttcaaactggatggccgt

SEQ ID NO: 925 - DNA, 984 bp, Artificial Sequence
  synthetic construct; Dicamba decarboxylase variant
atggctcaaggcaaagtggcactggaagaacatttcgcaatcccggaaacgctgcaagacgccgcagatttcgtcccgggcgactactggaaagaactgcagcatcgtctgctggatatccaagacactcgcctgaaactgatggataaacacgagatcgaaacgatgattctgtccctggctgcaccggctgttcaggcgattccggaccgtcgcaaagccattgaaatcgcacgtcgcgctaatgatttcctggcagaagaagttgctaaacgtccggaccgctttctggcattcgcagcactgccgctgcaggatccggacgcagctaccgaagaactgcaacgttgtgtccgcgatctgggcttcgtgggtgcgatggttaatggctttagccaggaaggcgatggtcaaaccccgctgtattacgacctgccgcagtatcgcccgttctggggtgaagtcgaaaaactggatgtgccgttttatctgcatccgcgtaacccgctgccgcaggattcccgtatctacgacggtcacccgtggctgctgggtccgacctgggcgttcgcccaagaaacggcggtgcatgccctgcgtctgatggcatctggcctgtttgatgaacacccgcgtctgaacattatcctgggtcatctgggcgaaggtctgccgtacatgatgtaccgtatcgatcatcgtatcgcatgggttaaagctccgccggattatccggcaaaacgtcgctttatggactacttcctcgaaaattttcacattaccacgtcaggcaacttccgtacccagacgctgattgatgcaatcctggaaattggtgctgatcgcatcctgttctcgaccgactggccgtttgaaaacattgatcatgccgctgactggtttaatgctacgtctattgccgaagctgaccgtgtcaaaatcggccgcaccaatgcccgtcgtctgttcaaactggatggccgt

SEQ ID NO: 926 - DNA, 984 bp, Artificial Sequence
  synthetic construct; Dicamba decarboxylase variant
atggctcaaggcaaagtggcactggaagaacatttcgcaatcccggaaacgctgaacgacgccgcaggtttcgtcccgggcgactactggaaagaactgcagcatcgtctgctggatatccaagaccaacgcctgagactgatggataaacacgagatcggaacgatgattctgtccctggctgcaccggctgttcaggcgattccggaccgtcgcaaagccattgaaatcgcacgtcgcgctaatgatttcctggcagaagaagttgctaaacgtccggaccgctttctggcattcgcagcactgccgctgcaggatccggacgcagctaccgaagaactgcaacgttgtgtcaacgatctgggcttcgtgggtgcgatggttaatggctttagccaggaaggcgatggtcaaaccccgctgtattacgacctgccgcagtatcgcccgttctggaaagaagtcgaaaaactggatgtgccgttttatctgcatccgcgtaacccgctgccgcaggattcccgtatctacgacggtcacccgtggctgctgggtccgacctgggcgttcgcccaagaaacggcggtgcatgccctgcgtctgatggcatctggcctgtttgatgaacacccgggtctgaacattatcctgggtcatatgggcgaaggtctgccgtacatgatgtaccgtatcgatcatcgtatcgcatgggttaaagctccgccggattatccggcaaaacgtcgctttatggactacttcctcgaaaattttcacattaccacgtcaggcaacttccgtacccagacgctgattgatgcaatcctggaaattggtgctgatcgcatcctgttctcgaccgactggccgtttgaaaacattgatcatgccgctgcctggtttaatgctacgtctattgccgaagctgaccgtgtcaaaatcggccgcaccaatgcccgtcgtctgttcaaactggatggccgt

SEQ ID NO: 927 - DNA, 984 bp, Artificial Sequence
  synthetic construct; Dicamba decarboxylase variant
atggctcaaggcaaagtggcactggaagaacatttcgcaatcccggaaacgctgcaagacgccgcaggtttcgtcccgggcgactactggaaagaactgcagcatcgtctgctggatatccaagacactcgcctgaaactgatggataaacacgagatcgaaacgatgattctgtccctggctgcaccggctgttcaggcgattccggaccgtcgcaaagccattgaaatcgcacgtcgcgctaatgatttcctggcagaagaagttgctaaacgtccggaccgctttctggcattcgcagcactgccgctgcaggatccggacgcagctaccgaagaactgcaacgttgtgtccgcgatctgggcttcgtgggtgcgatggttaatggctttagccaggaaggcgatggtcaaaccccgctgtattacgacctgccgcagtatcgcccgttctggggtgaagtcgaaaaactggatgtgccgttttatctgcatccgcgtaacccgctgccgcaggattcccgtatctacgacggtcacccgtggctgctgggtccgacctgggcgttcgcccaagaaacggcggtgcatgccctgcgtctgatggcatctggcctgtttgatgaacacccgggtctgaacattatcctgggtcatctgggcgaaggtctgccgtacatgatgtaccgtatcgatcatcgtatcgcatgggttaaagctccgccggattatccggcaaaacgtcgctttatggactacttcctcgaaaattttcacattaccacgtcaggcaacttccgtacccagacgctgattgatgcaatcctggaaattggtgctgatcgcatcctgttctcgaccgactggccgtttgaaaacattgatcatgccgctgcctggtttaatgctacgtctattgccgaagctgaccgtgtcaaaatcggccgcaccaatgcccgtcgtctgttcaaactggatggccgt

SEQ ID NO: 928 - DNA, 984 bp, Artificial Sequence
  synthetic construct; Dicamba decarboxylase variant
atggctcaaggcaaagtggcactggaagaacatttcgcaatcccggaaacgctgcaagacgccgcaggtttcgtcccgggcgactactggaaagaactgcagcatcgtctgctggatatccaagacactcgcctgaaactgatggataaacacgagatcgaaacgatgattctgtccctggctgcaccggctgttcaggcgattccggaccgtcgcaaagccattgaaatcgcacgtcgcgctaatgatttcctggcagaagaagttgctaaacgtccggaccgctttctggcattcgcagcactgccgctgcaggatccggacgcagctaccgaagaactgcaacgttgtgtcaacgatctgggcttcgtgggtgcgatggttaatggctttagccaggaaggcgatggtcaaaccccgctgtattacgacctgccgcagtatcgcccgttctggggtgaagtcgaaaaactggatgtgccgttttatctgcatccgcgtaacccgctgccgcaggattcccgtatctacgacggtcacccgtggctgctgggtccgacctgggcgttcgcccaagaaacggcggtgcatgccctgcgtctgatggcatctggcctgtttgatgaacacccgcgtctgaacattatcctgggtcatctgggcgaaggtctgccgtacatgatgtaccgtatcgatcatcgtatcgcatgggttaaagctccgccggattatccggcaaaacgtcgctttatggactacttcaacgaaaattttcacattaccacgtcaggcaacttccgtacccagacgctgattgatgcaatcctggaaattggtgctgatcgcatcctgttctcgaccgactggccgtttgaaaacattgatcatgccgctgactggtttaatgctacgtctattgccgaagctgaccgtgtcaaaatcggccgcaccaatgcccgtcgtctgttcaaactggatggccgt

SEQ ID NO: 929 - DNA, 984 bp, Artificial Sequence
  synthetic construct; Dicamba decarboxylase variant
atggctcaaggcaaagtggcactggaagaacatttcgcaatcccggaaacgctgaacgacgccgcagatttcgtcccgggcgactactggaaagaactgcagcatcgtctgctggatatccaagacactcgcctgaaactgatggataaacacgagatcgaaacgatgattctgtccctggctgcaccggctgttcaggcgattccggaccgtcgcaaagccattgaaatcgcacgtcgcgctaatgatttcctggcagaagaagttgctaaacgtccggaccgctttctggcattcgcagcactgccgatgcaggatccggacgcagctaccgaagaactgcaacgttgtgtcaacgatctgggcttcgtgggtgcgatggttaatggctttagcgtggaaggcgatggtcaaaccccgctgtattacgacctgccgcagtatcgcccgttctggaaagaagtcgaaaaactggatgtgccgttttatctgcatccgcgtaacccgctgccgcaggattcccgtatctacgacggtcacccgtggctgctgggtccgacctgggcgttcgcccaagaaacggcggtgcatgccctgcgtctgatggcatctggcctgtttgatgaacacccgggtctgaacattatcctgggtcatatgggcgaaggtctgccgtacatgatgtaccgtatcgatcatcgtatcgcatgggttaaagctccgccggattatccggcaaaacgtcgctttatggactacttcctcgaaaattttcacattaccacgtcaggcaacttccgtacccagacgctgattgatgcaatcctggaaattggtgctgatcgcatcctgttctcgaccgactggccgtttgaaaacattgatcatgccgctgcctggtttaatgctacgtctattgccgaagctgaccgtctcaaaatcggccgcaccaatgcccgtcgtctgttcaaactggatggccgt

SEQ ID NO: 930 - DNA, 984 bp, Artificial Sequence
  synthetic construct; Dicamba decarboxylase variant
atggctcaaggcaaagtggcactggaagaacatttcgcaatcccggaaacgctgcaagacgccgcaggtttcgtcccgggcgactactggaaagaactgcagcatcgtctgctggatatccaagacactcgcctgaaactgatggataaacacgagatcgaaacgatgattctgtccctggctgcaccggctgttcaggcgattccggaccgtcgcaaagccattgaaatcgcacgtcgcgctaatgatttcctggcagaagaagttgctaaacgtccggaccgctttctggcattcgcagcactgccgctgcaggatccggacgcagctaccgaagaactgcaacgttgtgtcaacgatctgggcttcgtgggtgcgatggttaatggctttagcgtggaaggcgatggtcaaaccccgctgtattacgacctgccgcagtatcgcccgttctggaaagaagtcgaaaaactggatgtgccgttttatctgcatccgcgtaacccgctgccgcaggattcccgtatctacgacggtcacccgtggctgctgggtccgacctgggcgttcgcccaagaaacggcggtgcatgccctgcgtctgatggcatctggcctgtttgatgaacacccgggtctgaacattatcctgggtcatatgggcgaaggtctgccgtacatgatgtaccgtatcgatcatcgtatcgcatgggttaaagctccgccggattatccggcaaaacgtcgctttatggactacttcaacgaaaattttcacattaccacgtcaggcaacttccgtacccagacgctgattgatgcaatcctggaaattggtgctgatcgcatcctgttctcgaccgactggccgtttgaaaacattgatcatgccgctgcctggtttaatgctacgtctattgccgaagctgaccgtgtcaaaatcggccgcaccaatgcccgtcgtctgttcaaactggatggccgt

SEQ ID NO: 931 - DNA, 984 bp, Artificial Sequence
  synthetic construct; Dicamba decarboxylase variant
atggctcaaggcaaagtggcactggaagaacatttcgcaatcccggaaacgctgaacgacgccgcagatttcgtcccgagcgagtactggaaagaactgcagcatcgtctgctggatatccaagacactcgcctgaaactgatggataaacacgagatcgaaacgatgattctgtccctggctgcaccggctgttcaggcgattccggaccgtgtcaaagccattgaaatcgcacgtcgcgctaatgatttcctggcagaagaagttgctaaacgtccggaccgctttctggcattcgcagcactgccgctgcaggatgtggacgcagctaccgaagaactgcaacgttgtgtcaacgatctgggcttcgtgggtgcgatggttaatggctttagtcaggaaggcgatggtcaaaccccgctgtattacgacctgccgcagtatcgcccgttctggggtgaagtcgaaaaactggatgtgccgttttatctgcatccgcgtaacccgctgccgcaggattcccgtatctacgacggtcacccgtggctgctgggtccgacctgggcgttcgcccaagaaacggcggtgcatgccctgcgtctgatggcatctggcctgtttgatgaacacccgcgtctgaacattatcctgggtcatatgggcgaaggtctgccgtacatgatgtaccgtatcgatcatcgtatcgcatgggttaaagctccgccggattatccggcaaaacgtcgctttatggactacttcctcgaaaattttcacattaccacgtcaggcaacttccgtacccagacgctgattgatgcaatcctggaaattggtgctgatcgcatcctgttctcgaccgactggccgtttgaaaacattgatcatgccgctgactggtttaatgctacgtctattgccgaagctgaccgcgtcaaaatcggccgcaccaatgcccgtcgtctgttcaaactggatggccgt

SEQ ID NO: 932 - DNA, 984 bp, Artificial Sequence
  synthetic construct; Dicamba decarboxylase variant
atggctcaaggcaaagtggcactggaagaacatttcgcaatcccggaaacgctgaacgacgccgcagatttcgtcccgagcgagtactggaaagaactgcagcatcgtctgctggatatccaagacactcgcctgaaactgatggataaacacgagatcggaacgatgattctgtccctggctgcaccggctgttcaggcgattccggaccgtgtcaaagccattgaaatcgcacgtcgcgctaatgatttcctggcagaagaagttgctaaacgtccggaccgctttctggcattcgcagcactgccgctgcaggatgtggacgcagctaccgaagaactgcaacgttgtgtcaacgatctgggcttcgtgggtgcgatggttaatggctttagccaggaaggcgatggtcaaaccccgctgtattacgacctgccgcagtatcgcccgttctggggtgaagtcgaaaaactggatgtgccgttttatctgcatccgcgtaacccgctgccgcaggattcccgtatctacgacggtcacccgtggctgctgggtccgacctgggcgttcgcccaagaaacggcggtgcatgccctgcgtctgatggcatctggcctgtttgatgaacacccgcgtctgaacattatcctgggtcatatgggcgaaggtctgccgtacatgatgtaccgtatcgatcatcgtatcgcatgggttaaagctccgccggattatccggcaaaacgtcgctttatggactacttcctcgaaaattttcacattaccacgtcaggcaacttccgtacccagacgctgattgatgcaatcctggaaattggtgctgatcgcatcctgttctcgaccgactggccgtttgaaaacattgatcatgccgctgactggtttaatgctacgtctattgccgaagctgaccgtgtcaaaatcggccgcaccaatgcccgtcgtctgttcaaactggatggccgt

SEQ ID NO: 933 - DNA, 984 bp, Artificial Sequence
  synthetic construct; Dicamba decarboxylase variant
atggctcaaggcaaagtggcactggaagaacatttcgcaatcccggaaacgctgcaggacgccgcagatttcgtcccgagcgagtactggaaagaactgcagcatcgtctgctggatatccaagacactcgcctgaaactgatggataaacacgagatcggaacgatgattctgtccctggctgcaccggctgttcaggcgattccggaccgtgtcaaagccattgaaatcgcacgtcgcgctaatgatttcctggcagaagaagttgctaaacgtccggaccgctttctggcattcgcagcactgccgctgcaggatgtggacgcagctaccgaagaactgcaacgttgtgtcaacgatctgggcttcgtgggtgcgatggttaatggctttagccaggaaggcgatggtcaaaccccgctgtattacgacctgccgcagtatcgcccgttctggggtgaagtcgaaaaactggatgtgccgttttatctgcatccgcgtaacccgctgccgcaggattcccgtatctacgacggtcacccgtggctgctgggtccgacctgggcgttcgcccaagaaacggcggtgcatgccctgcgtctgatggcatctggcctgtttgatgaacacccgcgtctgaacattatcctgggtcatatgggcgaaggtctgccgtacatgatgtaccgtatcgatcatcgtatcgcatgggttaaagctccgccggattatccggcaaaacgtcgctttatggactacttcctcgaaaattttcacattaccacgtcaggcaacttccgtacccagacgctgattgatgcaatcctggaaattggtgctgatcgcatcctgttctcgaccgactggccgtttgaaaacattgatcatgccgctgactggtttaatgctacgtctattgccgaagctgaccgtgtcaaaatcggccgcaccaatgcccgtcgtctgttcaaactggatggccgt

SEQ ID NO: 934 - DNA, 984 bp, Artificial Sequence
  synthetic construct; Dicamba decarboxylase variant
atggctcaaggcaaagtggcactggaagaacatttcgcaatcccggaaacgctgaacgacgccgcagggttcgtcccgagcgagtactggaaagaactgcagcatcgtctgctggatatccaagaccaacgcctgagactgatggataaacacgagatcgaaacgatgattctgtccctggctgcaccggctgttcagtcgattccggaccgtgtcaaagccattgaaatcgcacgtcgcgctaatgatttcctggcagaagaagttgctaaacgtccggaccgctttctggcattcgcagcactgccgcttcaggatgtggacgcagctaccgaagaactgcaacgttgtgtcaacgatctgggcttcgtgggtgcgatggttaatggctttagccaggaaggcgatggtcaaaccccgctgtattacgacctgccgcagtatcgcccgttctggggcgaagtcgaaaaactggatgtgccgttttatctgcatccgcgtaacccgctgccgcaggattcccgtatctacgacggtcacccgtggctgctgggtccgacctgggcgttcgcccaagaaacggcggtgcatgccctgcgtctgatggcatctggcctgtttgatgaacacccgggtctgaacattatcctgggtcatctgggcgaaggtctgccgtacatgatgtaccgtatcgatcatcgtatcgcatgggttaaagctccgccggattatccggcaaaacgtcgctttatggactacttcctcgaaaattttcacattaccacgtcaggcaacttccgtacccagacgctgattgatgcaatcctggaaattggtgctgatcgcatcctgttctcgaccgactggccgtttgaaaacattgatcatgccgctgcctggtttaatgctacgtctattgccgaagctgaccgtgtcaaaatcggccgcaccaatgcccgtcgtctgttcaaactggatggccgt

SEQ ID NO: 935 - DNA, 984 bp, Artificial Sequence
  synthetic construct; Dicamba decarboxylase variant
atggctcaaggcaaagtggcactggaagaacatttcgcaatcccggaaacgctgaacgacgccgcagatttcgtcccgagcgagtactggaaagaactgcagcatcgtctgctggatatccaagaccaacgcctgagactgatggataaacacgagatcggaacgatgattctgtccctggctgcaccggctgttcagtcgattccggaccgtgtcaaagccattgaaatcgcacgtcgcgctaatgatttcctggcagaagaagttgctaaacgtccggaccgctttctggcattcgcagcactgccgcttcaggatgtggacgcagctaccgaagaactgcaacgttgtgtccgcgatctgggcttcgtgggtgcgatggttaatggctttagccaggaaggcgatggtcaaaccccgctgtattacgacctgccgcagtatcgcccgttctggggcgaagtcgaaaaactggatgtgccgttttatctgcatccgcgtaacccgctgccgcaggattcccgtatctacgacggtcacccgtggctgctgggtccgacctgggcgttcgcccaagaaacggcggtgcatgccctgcgtctgatggcatctggcctgtttgatgaacacccgggtctgaacattatcctgggtcatctgggcgaaggtctgccgtacatgatgtaccgtatcgatcatcgtatcgcatgggttaaagctccgccggattatccggcaaaacgtcgctttatggactacttcctcgaaaattttcacattaccacgtcaggcaacttccgtacccagacgctgattgatgcaatcctggaaattggtgctgatcgcatcctgttctcgaccgactggccgtttgaaaacattgatcatgccgctgactggtttaatgctacgtctattgccgaagctgaccgtgtcaaaatcggccgcaccaatgcccgtcgtctgttcaaactggatggccgt

SEQ ID NO: 936 - DNA, 984 bp, Artificial Sequence
  synthetic construct; Dicamba decarboxylase variant
atggctcaaggcaaagtggcactggaagaacatttcgcaatcccggaaacgctgaacgacgccgcagatttcgtcccgagcgagtactggaaagaactgcagcatcgtctgctggatatccaagaccaacgcctgagactgatggataaacacgagatcgaaacgatgattctgtccctggctgcaccggctgttcaggcgattggcgaccgtgtcaaagccattgaaatcgcacgtcgcgctaatgatttcctggcagaagaagttgctaaacgtccggaccgctttctggcattcgcagcactgccgatgcaggatgtggacgcagctaccgaagaactgcaacgttgtgtccgcgatctgggcttcgtgggtgcgatggttaatggctttagccaggaaggcgatggtcaaaccccgctgtattacgacctgccgcagtatcgcccgttctggggcgaagtcgaaaaactggatgtgccgttttatctgcatccgcgtaacccgctgccgcaggattcccgtatctacgacggtcacccgtggctgctgggtccgacctgggcgttcgcccaagaaacggcggtgcatgccctgcgtctgatggcatctggcctgtttgatgaacacccgggtctgaacattatcctgggtcatatgggcgaaggtctgccgtacatgatgtaccgtatcgatcatcgtatcgcgtgggttaaagctccgccggattatccggcaaaacgtcgctttatggactacttcctcgaaaattttcacattaccacgtcaggcaacttccgtacccagacgctgattgatgcaatcctggaaattggtgctgatcgcatcctgttctcgaccgactggccgtttgaaaacattgatcatgccgctgcctggtttaatgctacgtctattgccgaagctgaccgtgtcaaaatcggccgcaccaatgcccgtcgtctgttcaaactggatggccgt

SEQ ID NO: 937 - DNA, 984 bp, Artificial Sequence
  synthetic construct; Dicamba decarboxylase variant
atggctcaaggcaaagtggcactggaagaacatttcgcaatcccggaaacgctgaacgacgccgcagggttcgtcccgagcgagtactggaaagaactgcagcatcgtctgctggatatccaagaccaacgcctgaagctgatggataaacacgagatcggaacgatgattctgtccctggctgcaccggctgttcaggcgattggcgaccgtgtcaaagccattgaaatcgcacgtcgcgctaatgatttcctggcagaagaagttgctaaacgtccggaccgctttctggcattcgcagcactgccgatgcaggatgtggacgcagctaccgaagaactgcaacgttgtgtccgcgatctgggcttcgtgggtgcgatggttaatggctttagccaggaaggcgatggtcaaaccccgctgtattacgacctgccgcagtatcgcccgttctggaaagaagtcgaaaaactggatgtgccgttttatctgcatccgcgtaacccgctgccgcaggattcccgtatctacgacggtcacccgtggctgctgggtccgacctgggcgttcgcccaagaaacggcggtgcatgccctgcgtctgatggcatctggcctgtttgatgaacacccgcgcctgaacattatcctgggtcatatgggcgaaggtctgccgtacatgatgtaccgtatcgatcatcgtatcgcatgggttaaagctccgccggattatccggcaaaacgtcgctttatggactacttcctcgaaaattttcacattaccacgtcaggcaacttccgtacccagacgctgattgatgcaatcctggaaattggtgctgatcgcatcctgttctcgaccgactggccgtttgaaaacattgatcatgccgctgactggtttaatgctacgtctattgccgaagctgaccgtgtcaaaatcggccgcaccaatgcccgtcgtctgttcaaactggatggccgt

SEQ ID NO: 938 - DNA, 984 bp, Artificial Sequence
  synthetic construct; Dicamba decarboxylase variant
atggctcaaggcaaagtggcactggaagaacatttcgcaatcccggaaacgctgaacgacgccgcagatttcgtcccgagcgagtactggaaagaactgcagcatcgtctgctggatatccaagaccaacgcctgagactgatggataaacacgagatcgaaacgatgattctgtccctggctgcaccggctgttcaggcgattggcgaccgtgtcaaagccattgaaatcgcacgtcgcgctaatgatttcctggcagaagaagttgctaaacgtccggaccgctttctggcattcgcagcactgccgcttcaggatgtggacgcagctaccgaagaactgcaacgttgtgtcaacgatctgggcttcgtgggtgcgatggttaatggctttagccaggaaggcgatggtcaaaccccgctgtattacgacctgccgcagtatcgcccgttctggaaagaagtcgaaaaactggatgtgccgttttatctgcatccgcgtaacccgctgccgcaggattcccgtatctacgacggtcacccgtggctgctgggtccgacctgggcgttcgcccaagaaacggcggtgcatgccctgcgtctgatggcatctggcctgtttgatgaacacccgggtctgaacattatcctgggtcatctgggcgaaggtctgccgtacatgatgtaccgtatcgatcatcgtatcgcatgggttaaagctccgccggattatccggcaaaacgtcgctttatggactacttcctcgaaaattttcacattaccacgtcaggcaacttccgtacccagacgctgattgatgcaatcctggaaattggtgctgatcgcatcctgttctcgaccgactggccgtttgaaaacattgatcatgccgctgcctggtttaatgctacgtctattgccgaagctgaccgtgtcaaaatcggccgcaccaatgcccgtcgtctgttcaaactggatggccgt

SEQ ID NO: 939 - DNA, 984 bp, Artificial Sequence
  synthetic construct; Dicamba decarboxylase variant
atggctcaaggcaaagtggcactggaagaacatttcgcaatcccggaaacgctgaacgacgccgcagatttcgtcccgagcgagtactggaaagaactgcagcatcgtctgctggatatccaagacactcgcctgagactgatggataaacacgagatcgaaacgatgattctgtccctggctgcaccggctgttcagtcgattccggaccgtgtcaaagccattgaaatcgcacgtcgcgctaatgatttcctggcagaagaagttgctaaacgtccggaccgctttctggcattcgcagcactgccgcttcaggatgtggacgcagctaccgaagaactgcaacgttgtgtccgcgatctgggcttcgtgggtgcgatggttaatggctttagccaggaaggcgatggtcaaaccccgctgtattacgacctgccgcagtatcgcccgttctggaaagaagtcgaaaaactggatgtgccgttttatctgcatccgcgtaacccgctgccgcaggattcccgtatctacgacggtcacccgtggctgctgggtccgacctgggcgttcgcccaagaaacggcggtgcatgccctgcgtctgatggcatctggcctgtttgatgaacacccgggtctgaacattatcctgggtcatctgggcgaaggtctgccgtacatgatgtaccgtatcgatcatcgtatcgcatgggttaaagctccgccggattatccggcaaaacgtcgctttatggactacttcctcgaaaattttcacattaccacgtcaggcaacttccgtacccagacgctgattgatgcaatcctggaaattggtgctgatcgcatcctgttctcgaccgactggccgtttgaaaacattgatcatgccgctgactggtttaatgctacgtctattgccgaagctgaccgtgtcaaaatcggccgcaccaatgcccgtcgtctgttcaaactggatggccgt

SEQ ID NO: 940 - DNA, 984 bp, Artificial Sequence
  synthetic construct; Dicamba decarboxylase variant
atggctcaaggcaaagtggcactggaagaacatttcgcaatcccggaaacgctgaacgacgccgcagatttcgtcccgagcgagtactggaaagaactgcagcatcgtctgctggatatccaagaccaacgcctgaagctgatggataaacacgagatcgaaacgatgattctgtccctggctgcaccggctgttcaggcgattggcgaccgtgtcaaagccattgaaatcgcacgtcgcgctaatgatttcctggcagaagaagttgctaaacgtccggaccgctttctggcattcgcagcactgccgatgcaggatgtggacgcagctaccgaagaactgcaacgttgtgtccgcgatctgggcttcgtgggtgcgatggttaatggctttagccaggaaggcgatggtcaaaccccgctgtattacgacctgccgcagtatcgcccgttctggaaagaagtcgaaaaactggatgtgccgttttatctgcatccgcgtaacccgctgccgcaggattcccgtatctacgacggtcacccgtggctgctgggtccgacctgggcgttcgcccaagaaacggcggtgcatgccctgcgtctgatggcatctggcctgtttgatgaacacccgcgcctgaacattatcctgggtcatatgggcgaaggtctgccgtacatgatgtaccgtatcgatcatcgtatcgcatgggttaaagctccgccggattatccggcaaaacgtcgctttatggactacttcctcgaaaattttcacattaccacgtcaggcaacttccgtacccagacgctgattgatgcaatcctggaaattggtgctgatcgcatcctgttctcgaccgactggccgtttgaaaacattgatcatgccgctgcctggtttaatgctacgtctattgccgaagctgaccgtgtcaaaatcggccgcaccaatgcccgtcgtctgttcaaactggatggccgt

SEQ ID NO: 941 - DNA, 984 bp, Artificial Sequence
  synthetic construct; Dicamba decarboxylase variant
atggctcaaggcaaagtggcactggaagaacatttcgcaatcccggaaacgctgaacgacgccgcagatttcgtcccgagcgagtactggaaagaactgcagcatcgtctgctggatatccaagaccaacgcctgagactgatggataaacacgagatcgaaacgatgattctgtccctggctgcaccggctgttcaggcgattggcgaccgtgtcaaagccattgaaatcgcacgtcgcgctaatgatttcctggcagaagaagttgctaaacgtccggaccgctttctggcattcgcagcactgccgatgcaggatgtggacgcagctaccgaagaactgcaacgttgtgtccgcgatctgggcttcgtgggtgcgatggttaatggctttagccaggaaggcgatggtcaaaccccgctgtattacgacctgccgcagtatcgcccgttctggggcgaagtcgaaaaactggatgtgccgttttatctgcatccgcgtaacccgctgccgcaggattcccgtatctacgacggtcacccgtggctgctgggtccgacctgggcgttcgcccaagaaacggcggtgcatgccctgcgtctgatggcatctggcctgtttgatgaacacccgggtctgaacattatcctgggtcatctgggcgaaggtctgccgtacatgatgtaccgtatcgatcatcgtatcgcatgggttaaagctccgccggattatccggcaaaacgtcgctttatggactacttcctcgaaaattttcacattaccacgtcaggcaacttccgtacccagacgctgattgatgcaatcctggaaattggtgctgatcgcatcctgttctcgaccgactggccgtttgaaaacattgatcatgccgctgactggtttaatgctacgtctattgccgaagctgaccgtgtcaaaatcggccgcaccaatgcccgtcgtctgttcaaactggatggccgt

SEQ ID NO: 942 - DNA, 984 bp, Artificial Sequence
  synthetic construct; Dicamba decarboxylase variant
atggctcaaggcaaagtggcactggaagaacatttcgcaatcccggaaacgctgaacgacgccgcagggttcgtcccgagcgagtactggaaagaactgcagcatcgtctgctggatatccaagaccaacgcctgagactgatggataaacacgagatcggaacgatgattctgtccctggctgcaccggctgttcagtcgattggcgaccgtgtcaaagccattgaaatcgcacgtcgcgctaatgatttcctggcagaagaagttgctaaacgtccggaccgctttctggcattcgcagcactgccgcttcaggatgtggacgcagctaccgaagaactgcaacgttgtgtcaacgatctgggcttcgtgggtgcgatggttaatggctttagccaggaaggcgatggtcaaaccccgctgtattacgacctgccgcagtatcgcccgttctggggcgaagtggaaaaactggatgtgccgttttatctgcatccgcgtaacccgctgccgcaggattcccgtatctacgacggtcacccgtggctgctgggtccgacctgggcgttcgcccaagaaacggcggtgcatgccctgcgtctgatggcatctggcctgtttgatgaacacccgggtctgaacattatcctgggtcatctgggcgaaggtctgccgtacatgatgtaccgtatcgatcatcgtatcgcatgggttaaagctccgccggattatccggcaaaacgtcgctttatggactacttcctcgaaaattttcacattaccacgtcaggcaacttccgtacccagacgctgattgatgcaatcctggaaattggtgctgatcgcatcctgttctcgaccgactggccgtttgaaaacattgatcatgccgctgactggtttaatgctacgtctattgccgaagctgaccgtgtcaaaatcggccgcaccaatgcccgtcgtctgttcaaactggatggccgt

SEQ ID NO: 943 - DNA, 984 bp, Artificial Sequence
  synthetic construct; Dicamba decarboxylase variant
atggctcaaggcaaagtggcactggaagaacatttcgcaatcccggaaacgctgaacgacgccgcagatttcgtcccgagcgagtactggaaagaactgcagcatcgtctgctggatatccaagaccaacgcctgagactgatggataaacacgagatcgaaacgatgattctgtccctggctgcaccggctgttcagtcgattccggaccgtgtcaaagccattgaaatcgcacgtcgcgctaatgatttcctggcagaagaagttgctaaacgtccggaccgctttctggcattcgcagcactgccgatgcaggatgtggacgcagctaccgaagaactgcaacgttgtgtcaacgatctgggcttcgtgggtgcgatggttaatggctttagccaggaaggcgatggtcaaaccccgctgtattacgacctgccgcagtatcgcccgttctggggcgaagtcgaaaaactggatgtgccgttttatctgcatccgcgtaacccgctgccgcaggattcccgtatctacgacggtcacccgtggctgctgggtccgacctgggcgttcgcccaagaaacggcggtgcatgccctgcgtctgatggcatctggcctgtttgatgaacacccgcgcctgaacattatcctgggtcatctgggcgaaggtctgccgtacatgatgtaccgtatcgatcatcgtatcgcatgggttaaagctccgccggattatccggcaaaacgtcgctttatggactacttcctcgaaaattttcacattaccacgtcaggcaacttccgtacccagacgctgattgatgcaatcctggaaattggtgctgatcgcatcctgttctcgaccgactggccgtttgaaaacattgatcatgccgctgactggtttaatgctacgtctattgccgaagctgaccgtgtcaaaatcggccgcaccaatgcccgtcgtctgttcaaactggatggccgt

SEQ ID NO: 944 - DNA, 984 bp, Artificial Sequence
  synthetic construct; Dicamba decarboxylase variant
atggctcaaggcaaagtggcactggaagaacatttcgcaatcccggaaacgctgaacgacgccgcagggttcgtcccgagcgagtactggaaagaactgcagcatcgtctgctggatatccaagacactcgcctgaaactgatggataaacacgagatcggaacgatgattctgtccctggctgcaccggctgttcaggcgattccggaccgtgtcaaagccattgaaatcgcacgtcgcgctaatgatttcctggcagaagaagttgctaaacgtccggaccgctttctggcattcgcagcactgccgctgcaggatcccgacgcagctaccgaagaactgcaacgttgtgtcaacgatctgggcttcgtgggtgcgatggttaatggctttagccaggaaggcgatggtcaaaccccgctgtattacgacctgccgcagtatcgcccgttctggggtgaagtcgaaaaactggatgtgccgttttatctgcatccgcgtaacccgctgccgcaggattcccgtatctacgacggtcacccgtggctgctgggtccgacctgggcgttcgcccaagaaacggcggtgcatgccctgcgtctgatggcatctggcctgtttgatgaacacccgcgtctgaacattatcctgggtcatatgggcgaaggtctgccgtacatgatgtaccgtatcgatcatcgtatcgcatgggttaaagctccgccggattatccggcaaaacgtcgctttatggactacttcctcgaaaattttcacattaccacgtcaggcaacttccgtacccagacgctgattgatgcaatcctggaaattggtgctgatcgcatcctgttctcgaccgactggccgtttgaaaacattgatcatgccgctgactggtttaatgctacgtctattgccgaagctgaccgtgtcaaaatcggccgcaccaatgcccgtcgtctgttcaaactggatggccgt

SEQ ID NO: 945 - DNA, 984 bp, Artificial Sequence
  synthetic construct; Dicamba decarboxylase variant
atggctcaaggcaaagtggcactggaagaacatttcgcaatcccggaaacgctgaacgacgccgcagggttcgtcccgagcgagtactggaaagaactgcagcatcgtctgctggatatccaagacactcgcctgaaactgatggataaacacgagatcgaaacgatgattctgtccctggctgcaccggctgttcaggcgattccggaccgtcgtaaagccattgaaatcgcacgtcgcgctaatgatttcctggcagaagaagttgctaaacgtccggaccgctttctggcattcgcagcactgccgctgcaggatcccgacgcagctaccgaagaactgcaacgttgtgtcaacgatctgggcttcgtgggtgcgatggttaatggctttagccaggaaggcgatggtcaaaccccgctgtattacgacctgccgcagtatcgcccgttctggggtgaagtcgaaaaactggatgtgccgttttatctgcatccgcgtaacccgctgccgcaggattcccgtatctacgacggtcacccgtggctgctgggtccgacctgggcgttcgcccaagaaacggcggtgcatgccctgcgtctgatggcatctggcctgtttgatgtacacccgcgtctgaacattatcctgggtcatatgggcgaaggtctgccgtacatgatgtaccgtatcgatcatcgtatcgcatgggttaaagctccgccggattatccggcaaaacgtcgctttatggactacttcctcgaaaattttcacattaccacgtcaggcaacttccgtacccagacgctgattgatgcaatcctggaaattggtgctgatcgcatcctgttctcgaccgactggccgtttgaaaacattgatcatgccgctgactggtttaatgctacgtctattgccgaagctgaccgtgtcaaaatcggccgcaccaatgcccgtcgtctgttcaaactggatggccgt

SEQ ID NO: 946 - DNA, 984 bp, Artificial Sequence
  synthetic construct; Dicamba decarboxylase variant
atggctcaaggcaaagtggcactggaagaacatttcgcaatcccggaaacgctgcaggacgccgcagatttcgtcccgagcgagtactggaaagaactgcagcatcgtctgctggatatccaagacactcgcctgaaactgatggataaacacgagatcgaaacgatgattctgtccctggctgcaccggctgttcaggcgattccggaccgtgtcaaagccattgaaatcgcacgtcgcgctaatgatttcctggcagaagaagttgctaaacgtccggaccgctttctggcattcgcagcactgccgctgcaggatgtggacgcagctaccgaagaactgcaacgttgtgtcaacgatctgggcttcgtgggtgcgatggttaatggctttagccaggaaggcgatggtcaaaccccgctgtattacgacctgccgcagtatcgcccgttctggggtgaagtcgaaaaactggatgtgccgttttatctgcatccgcgtaacccgctgccgcaggattcccgtatctacgacggtcacccgtggctgctgggtccgacctgggcgttcgcccaagaaacggcggtgcatgccctgcgtctgatggcatctggcctgtttgatgaacacccgcgtctgaacattatcctgggtcatatgggcgaaggtctgccgtacatgatgtaccgtatcgatcatcgtatcgcatgggttaaagctccgccggattatccggcaaaacgtcgctttatggactacttcctcgaaaattttcacattaccacgtcaggcaacttccgtacccagacgctgattgatgcaatcctggaaattggtgctgatcgcatcctgttctcgaccgactggccgtttgaaaacattgatcatgccgctgactggtttaatgctacgtctattgccgaagctgaccgtgtcaaaatcggccgcaccaatgcccgtcgtctgttcaaactggatggccgt

SEQ ID NO: 947 - DNA, 984 bp, Artificial Sequence
  synthetic construct; Dicamba decarboxylase variant
atggctcaaggcaaagtggcactggaagaacatttcgcaatcccggaaacgctgaacgacgccgcagggttcgtcccgagcgagtactggaaagaactgcagcatcgtctgctggatatccaagacactcgcctgaaactgatggataaacacgagatcggaacgatgattctgtccctggctgcaccggctgttcaggcgattccggaccgtgtcaaagccattgaaatcgcacgtcgcgctaatgatttcctggcagaagaagttgctaaacgtccggaccgctttctggcattcgcagcactgccgctgcaggatgtggacgcagctaccgaagaactgcaacgttgtgtcaacgatctgggcttcgtgggtgcgatggttaatggctttagccaggaaggcgatggtcaaaccccgctgtattacgacctgccgcagtatcgcccgttctggggtgaagtcgaaaaactggatgtgccgttttatctgcatccgcgtaacccgctgccgcaggattcccgtatctacgacggtcacccgtggctgctgggtccgacctgggcgttcgcccaagaaacggcggtgcatgccctgcgtctgatggcatctggcctgtttgatgaacacccgcgtctgaacattatcctgggtcatatgggcgaaggtctgccgtacatgatgtaccgtatcgatcatcgtatcgcatgggttaaagctccgccggattatccggcaaaacgtcgctttatggactacttcctcgaaaattttcacattaccacgtcaggcaacttccgtacccagacgctgattgatgcaatcctggaaattggtgctgatcgcatcctgttctcgaccgactggccgtttgaaaacattgatcatgccgctgactggtttaatgctacgtctattgccgaagctgaccgtgtcaaaatcggccgcaccaatgcccgtcgtctgttcaaactggatggccgt

SEQ ID NO: 948 - DNA, 984 bp, Artificial Sequence
  synthetic construct; Dicamba decarboxylase variant
atggctcaaggcaaagtggcactggaagaacatttcgcaatcccggaaacgctgaacgacgccgcagggttcgtcccgagcgagtactggaaagaactgcagcatcgtctgctggatatccaagacactcgcctgaaactgatggataaacacgagatcgaaacgatgattctgtccctggctgcaccggctgttcaggcgattccggaccgtgtcaaagccattgaaatcgcacgtcgcgctaatgatttcctggcagaagaagttgctaaacgtccggaccgctttctggcattcgcagcactgccgctgcaggatgtggacgcagctaccgaagaactgcaacgttgtgtcaacgatctgggcttcgtgggtgcgatggttaatggctttagccaggaaggcgatggtcaaaccccgctgtattacgacctgccgcagtatcgcccgttctggggtgaagtcgaaaaactggatgtgccgttttatctgcatccgcgtaacccgctgccgcaggattcccgtatctacgacggtcacccgtggctgctgggtccgacctgggcgttcgcccaagaaacggcggtgcatgccctgcgtctgatggcatctggcctgtttgatgaacacccgcgtctgaacattatcctgggtcatatgggcgaaggtctgccgtacatgatgtaccgtatcgatcatcgtatcgcatgggttaaagctccgccggattatccggcaaaacgtcgctttatggactacttcctcgaaaattttcacattaccacgtcaggcaacttccgtacccagacgctgattgatgcaatcctggaaattggtgctgatcgcatcctgttctcgaccgactggccgtttgaaaacattgatcatgccgctgactggtttaatgctacgtctattgccgaagctgaccgtgtcaaaatcggccgcaccaatgcccgtcgtctgttcaaactggatggccgt

SEQ ID NO: 949 - DNA, 984 bp, Artificial Sequence
  synthetic construct; Dicamba decarboxylase variant
atggctcaaggcaaagtggcactggaagaacatttcgcaatcccggaaacgctgaacgacgccgcagggttcgtcccgagcgagtactggaaagaactgcagcatcgtctgctggatatccaagacactcgcctgaaactgatggataaacacgagatcgaaacgatgattctgtccctggctgcaccggctgttcaggcgattccggaccgtcgtaaagccattgaaatcgcacgtcgcgctaatgatttcctggcagaagaagttgctaaacgtccggaccgctttctggcattcgcagcactgccgctgcaggatgtggacgcagctaccgaagaactgcaacgttgtgtcaacgatctgggcttcgtgggtgcgatggttaatggctttagccaggaaggcgatggtcaaaccccgctgtattacgacctgccgcagtatcgcccgttctggggtgaagtcgaaaaactggatgtgccgttttatctgcatccgcgtaacccgctgccgcaggattcccgtatctacgacggtcacccgtggctgctgggtccgacctgggcgttcgcccaagaaacggcggtgcatgccctgcgtctgatggcatctggcctgtttgatgaacacccgcgtctgaacattatcctgggtcatatgggcgaaggtctgccgtacatgatgtaccgtatcgatcatcgtatcgcatgggttaaagctccgccggattatccggcaaaacgtcgctttatggactacttcctcgaaaattttcacattaccacgtcaggcaacttccgtacccagacgctgattgatgcaatcctggaaattggtgctgatcgcatcctgttctcgaccgactggccgtttgaaaacattgatcatgccgctgactggtttaatgctacgtctattgccgaagctgaccgtgtcaaaatcggccgcaccaatgcccgtcgtctgttcaaactggatggccgt

SEQ ID NO: 950 - DNA, 984 bp, Artificial Sequence
  synthetic construct; Dicamba decarboxylase variant
atggctcaaggcaaagtggcactggaagaacatttcgcaatcccggaaacgctgaacgacgccgcagatttcgtcccgagcgagtactggaaagaactgcagcatcgtctgctggatatccaagacactcgcctgaaactgatggataaacacgagatcgaaacgatgattctgtccctggctgcaccggctgttcaggcgattccggaccgtcgtaaagccattgaaatcgcacgtcgcgctaatgatttcctggcagaagaagttgctaaacgtccggaccgctttctggcattcgcagcactgccgctgcaggatgtggacgcagctaccgaagaactgcaacgttgtgtcaacgatctgggcttcgtgggtgcgatggttaatggctttagccaggaaggcgatggtcaaaccccgctgtattacgacctgccgcagtatcgcccgttctggggtgaagtcgaaaaactggatgtgccgttttatctgcatccgcgtaacccgctgccgcaggattcccgtatctacgacggtcacccgtggctgctgggtccgacctgggcgttcgcccaagaaacggcggtgcatgccctgcgtctgatggcatctggcctgtttgatgaacacccgcgtctgaacattatcctgggtcatatgggcgaaggtctgccgtacatgatgtaccgtatcgatcatcgtatcgcatgggttaaagctccgccggattatccggcaaaacgtcgctttatggactacttcctcgaaaattttcacattaccacgtcaggcaacttccgtacccagacgctgattgatgcaatcctggaaattggtgctgatcgcatcctgttctcgaccgactggccgtttgaaaacattgatcatgccgctgactggtttaatgctacgtctattgccgaagctgaccgtgtcaaaatcggccgcaccaatgcccgtcgtctgttcaaactggatggccgt

SEQ ID NO: 951 - DNA, 984 bp, Artificial Sequence
  synthetic construct; Dicamba decarboxylase variant
atggctcaaggcaaagtggcactggaagaacatttcgcaatcccggaaacgctgaacgacgccgcagatttcgtcccgagcgagtactggaaagaactgcagcatcgtctgctggatatccaagaccaacgcctgagactgatggataaacacgagatcgaaacgatgattctgtccctggctgcaccggctgttcagtcgattccggaccgtgtcaaagccattgaaatcgcacgtcgcgctaatgatttcctggcagaagaagttgctaaacgtccggaccgctttctggcattcgcagcactgccgatgcaggatgtggacgcagctaccgaagaactgcaacgttgtgtcaacgatctgggcttcgtgggtgcgatggttaatggctttagccaggaaggcgatggtcaaaccccgctgtattacgacctgccgcagtatcgcccgttctggaaagaagtcgaaaaactggatgtgccgttttatctgcatccgcgtaacccgctgccgcaggattcccgtatctacgacggtcacccgtggctgctgggtccgacctgggcgttcgcccaagaaacggcggtgcatgccctgcgtctgatggcatctggcctgtttgatgaacacccgggtctgaacattatcctgggtcatctgggcgaaggtctgccgtacatgatgtaccgtatcgatcatcgtatcgcatgggttaaagctccgccggattatccggcaaaacgtcgctttatggactacttcctcgaaaattttcacattaccacgtcaggcaacttccgtacccagacgctgattgatgcaatcctggaaattggtgctgatcgcatcctgttctcgaccgactggccgtttgaaaacattgatcatgccgctgactggtttaatgctacgtctattgccgaagctgaccgtgtcaaaatcggccgcaccaatgcccgtcgtctgttcaaactggatggccgt

SEQ ID NO: 952 - DNA, 984 bp, Artificial Sequence
  synthetic construct; Dicamba decarboxylase variant
atggctcaaggcaaagtggcactggaagaacatttcgcaatcccggaaacgctgaacgacgccgcagatttcgtcccgagcgagtactggaaagaactgcagcatcgtctgctggatatccaagaccaacgcctgagactgatggataaacacgagatcgaaacgatgattctgtccctggctgcaccggctgttcaggcgattggcgaccgtgtcaaagccattgaaatcgcacgtcgcgctaatgatttcctggcagaagaagttgctaaacgtccggaccgctttctggcattcgcagcactgccgcttcaggatgtggacgcagctaccgaagaactgcaacgttgtgtccgcgatctgggcttcgtgggtgcgatggttaatggctttagccaggaaggcgatggtcaaaccccgctgtattacgacctgccgcagtatcgcccgttctggaaagaagtcgaaaaactggatgtgccgttttatctgcatccgcgtaacccgctgccgcaggattcccgtatctacgacggtcacccgtggctgctgggtccgacctgggcgttcgcccaagaaacggcggtgcatgccctgcgtctgatggcatctggcctgtttgatgaacacccgggtctgaacattatcctgggtcatatgggcgaaggtctgccgtacatgatgtaccgtatcgatcatcgtatcgcatgggttaaagctccgccggattatccggcaaaacgtcgctttatggactacttcctcgaaaattttcacattaccacgtcaggcaacttccgtacccagacgctgattgatgcaatcctggaaattggtgctgatcgcatcctgttctcgaccgactggccgtttgaaaacattgatcatgccgctgactggtttaatgctacgtctattgccgaagctgaccgtgtcaaaatcggccgcaccaatgcccgtcgtctgttcaaactggatggccgt

SEQ ID NO: 953 - DNA, 984 bp, Artificial Sequence
  synthetic construct; Dicamba decarboxylase variant
atggctcaaggcaaagtggcactggaagaacatttcgcaatcccggaaacgctgaacgacgccgcagatttcgtcccgagcgagtactggaaagaactgcagcatcgtctgctggatatccaagaccaacgcctgaagctgatggataaacacgagatcgaaacgatgattctgtccctggctgcaccggctgttcagtcgattccggaccgtgtcaaagccattgaaatcgcacgtcgcgctaatgatttcctggcagaagaagttgctaaacgtccggaccgctttctggcattcgcagcactgccgcttcaggatgtggacgcagctaccgaagaactgcaacgttgtgtccgcgatctgggcttcgtgggtgcgatggttaatggctttagccaggaaggcgatggtcaaaccccgctgtattacgacctgccgcagtatcgcccgttctggaaagaagtcgaaaaactggatgtgccgttttatctgcatccgcgtaacccgctgccgcaggattcccgtatctacgacggtcacccgtggctgctgggtccgacctgggcgttcgcccaagaaacggcggtgcatgccctgcgtctgatggcatctggcctgtttgatgaacacccgcgcctgaacattatcctgggtcatctgggcgaaggtctgccgtacatgatgtaccgtatcgatcatcgtatcgcatgggttaaagctccgccggattatccggcaaaacgtcgctttatggactacttcctcgaaaattttcacattaccacgtcaggcaacttccgtacccagacgctgattgatgcaatcctggaaattggtgctgatcgcatcctgttctcgaccgactggccgtttgaaaacattgatcatgccgctgcctggtttaatgctacgtctattgccgaagctgaccgtgtcaaaatcggccgcaccaatgcccgtcgtctgttcaaactggatggccgt

SEQ ID NO: 954 - DNA, 984 bp, Artificial Sequence
  synthetic construct; Dicamba decarboxylase variant
atggctcaaggcaaagtggcactggaagaacatttcgcaatcccggaaacgctgaacgacgccgcagggttcgtcccgagcgagtactggaaagaactgcagcatcgtctgctggatatccaagaccaacgcctgagactgatggataaacacgagatcgaaacgatgattctgtccctggctgcaccggctgttcaggcgattggcgaccgtgtcaaagccattgaaatcgcacgtcgcgctaatgatttcctggcagaagaagttgctaaacgtccggaccgctttctggcattcgcagcactgccgatgcaggatgtggacgcagctaccgaagaactgcaacgttgtgtccgcgatctgggcttcgtgggtgcgatggttaatggctttagccaggaaggcgatggtcaaaccccgctgtattacgacctgccgcagtatcgcccgttctggaaagaagtcgaaaaactggatgtgccgttttatctgcatccgcgtaacccgctgccgcaggattcccgtatctacgacggtcacccgtggctgctgggtccgacctgggcgttcgcccaagaaacggcggtgcatgccctgcgtctgatggcatctggcctgtttgatgaacacccgggtctgaacattatcctgggtcatctgggcgaaggtctgccgtacatgatgtaccgtatcgatcatcgtatcgcatgggttaaagctccgccggattatccggcaaaacgtcgctttatggactacttcctcgaaaattttcacattaccacgtcaggcaacttccgtacccagacgctgattgatgcaatcctggaaattggtgctgatcgcatcctgttctcgaccgactggccgtttgaaaacattgatcatgccgctgcctggtttaatgctacgtctattgccgaagctgaccgtgtcaaaatcggccgcaccaatgcccgtcgtctgttcaaactggatggccgt

SEQ ID NO: 955 - DNA, 984 bp, Artificial Sequence
  synthetic construct; Dicamba decarboxylase variant
atggctcaaggcaaagtggcactggaagaacatttcgcaatcccggaaacgctgcaggacgccgcagatttcgtcccgagcgagtactggaaagaactgcagcatcgtctgctggatatccaagaccaacgcctgaagctgatggataaacacgagatcgaaacgatgattctgtcccttgctgcaccggctgttcagtcgattccggaccgtgtcaaagccattgaaatcgcacgtcgcgctaatgatttcctggcagaagaagttgctaaacgtccggaccgctttctggcattcgcagcactgccgatgcaggatgtggacgcagctaccgaagaactgcaacgttgtgtccgcgatctgggcttcgtgggtgcgatggttaatggctttagccaggaaggcgatggtcaaaccccgctgtattacgacctgccgcagtatcgcccgttctggaaagaagtcgaaaaactggatgtgccgttttatctgcatccgcgtaacccgctgccgcaggattcccgtatctacgacggtcacccgtggctgctgggtccgacctgggcgttcgcccaagaaacggcggtgcatgccctgcgtctgatggcatctggcctgtttgatgaacacccgggtctgaacattatcctgggtcatatgggcgaaggtctgccgtacatgatgtaccgtatcgatcatcgtatcgcatgggttaaagctccgccggattatccggcaaaacgtcgctttatggactacttcctcgaaaattttcacattaccacgtcaggcaacttccgtacccagacgctgattgatgcaatcctggaaattggtgctgatcgcatcctgttctcgaccgactggccgtttgaaaacattgatcatgccgctgactggtttaatgctacgtctattgccgaagctgaccgtgtcaaaatcggccgcaccaatgcccgtcgtctgttcaaactggatggccgt

SEQ ID NO: 956 - DNA, 984 bp, Artificial Sequence
  synthetic construct; Dicamba decarboxylase variant
atggctcaaggcaaagtggcactggaagaacatttcgcaatcccggaaacgctgaacgacgccgcagatttcgtcccgagcgagtactggaaagaactgcagcatcgtctgctggatatccaagaccaacgcctgagactgatggataaacacgagatcgaaacgacgattctgtccctggctgcaccggctgttcaggcgattggcgaccgtgtcaaagccattgaaatcgcacgtcgcgctaatgatttcctggcagaagaagttgctaaacgtccggaccgctttctggcattcgcagcactgccgcttcaggatgtggacgcagctaccgaagaactgcaacgttgtgtcaacgatctgggcttcgtgggtgcgatggttaatggctttagccaggaaggcgatggtcaaaccccgctgtattacgacctgccgcagtatcgcccgttctggaaagaagtcgaaaaactggatgtgccgttttatctgcatccgcgtaacccgctgccgcaggattcccgtatctacgacggtcacccgtggctgctgggtccgacctgggcgttcgcccaagaaacggcggtgcatgccctgcgtctgatggcatctggcctgtttgatgaacacccgcgcctgaacattatcctgggtcatatgggcgaaggtctgccgtacatgatgtaccgtatcgatcatcgtatcgcatgggttaaagctccgccggattatccggcaaaacgtcgctttatggactacttcctcgaaaattttcacattaccacgtcaggcaacttccgtacccagacgctgattgatgcaatcctggaaattggtgctgatcgcatcctgttctcgaccgactggccgtttgaaaacattgatcatgccgctgactggtttaatgctacgtctattgccgaagctgaccgtgtcaaaatcggccgcaccaatgcccgtcgtctgttcaaactggatggccgt

SEQ ID NO: 957 - DNA, 984 bp, Artificial Sequence
  synthetic construct; Dicamba decarboxylase variant
atggctcaaggcaaagtggcactggaagaacatttcgcaatcccggaaacgctgaacgacgccgcagatttcgtcccgagcgagtactggaaagaactgcagcatcgtctgctggatatccaagacactcgcctgaaactgatggataaacacgagatcggaacgatgattctgtccctggctgcaccggctgttcaggcgattccggaccgtgtcaaagccattgaaatcgcacgtcgcgctaatgatttcctggcagaagaagttgctaaacgtccggaccgctttctggcattcgcagcactgccgctgcaggatcccgacgcagctaccgaagaactgcaacgttgtgtcaacgatctgggcttcgtgggtgcgatggttaatggctttagccaggaaggcgatggtcaaaccccgctgtattacgacctgccgcagtatcgcccgttctggggtgaagtcgaaaaactggatgtgccgttttatctgcatccgcgtaacccgctgccgcaggattcccgtatctacgacggtcacccgtggctgctgggtccgacctgggcgttcgcccaagaaacggcggtgcatgccctgcgtctgatggcatctggcctgtttgatgaacacccgcgtctgaacattatcctgggtcatatgggcgaaggtctgccgtacatgatgtaccgtatcgatcatcgtatcgcatgggttaaagctccgccggattatccggcaaaacgtcgctttatggactacttcctcgaaaattttcacattaccacgtcaggcaacttccgtacccagacgctgattgatgcaatcctggaaattggtgctgatcgcatcctgttctcgaccgactggccgtttgaaaacattgatcatgccgctgactggtttaatgctacgtctattgccgaagctgaccgtgtcaaaatcggccgcaccaatgcccgtcgtctgttcaaactggatggccgt

SEQ ID NO: 958 - DNA, 984 bp, Artificial Sequence
  synthetic construct; Dicamba decarboxylase variant
atggctcaaggcaaagtggcactggaagaacatttcgcaatcccggaaacgctgaacgacgccgcagatttcgtcccgagcgagtactggaaagaactgcagcatcgtctgctggatatccaagacactcgcctgaaactgatggataaacacgagatcggaacgatgattctgtccctggctgcaccggctgttcaggcgattccggaccgtgtcaaagccattgaaatcgcacgtcgcgctaatgatttcctggcagaagaagttgctaaacgtccggaccgctttctggcattcgcagcactgccgctgcaggatcccgacgcagctaccgaagagctgcaacgttgtgtcaacgatctgggcttcgtgggtgcgatggttaatggctttagccaggaaggcgatggtcaaaccccgctgtattacgacctgccgcagtatcgcccgttctggggtgaagtcgaacaactggatgtgccgttttatctgcatccgcgtaacccgctgccgcaggattcccgtatctacgacggtcacccgtggctgctgggtccgacctgggcgttcgcccaagaaacggcggtgcatgccctgcgtctgatggcatctggcctgtttgatgaacacccgcgtctgaacattatcctgggtcatatgggcgaaggtctgccgtacatgatgtaccgtatcgatcatcgtatcgcatgggttaaagctccgccggattatccggcaaaacgtcgctttatggactacttcctcgaaaattttcacattaccacgtcaggcaacttccgtacccagacgctgattgatgcaatcctggaaattggtgctgatcgcatcctgttctcgaccgactggccgtttgaaaacattgatcatgccgctgactggtttaatgctacgtctattgccgaagctgaccgtgtcaaaatcggccgcaccaatgcccgtcgtctgttcaaactggatggccgt

SEQ ID NO: 959 - DNA, 984 bp, Artificial Sequence
  synthetic construct; Dicamba decarboxylase variant
atggctcaaggcaaagtggcactggaagaacatttcgcaatcccggaaacgctgcaggacgccgcagatttcgtcccgagcgagtactggaaagaactgcagcatcgtctgctggatatccaagacactcgcctgaaactgatggataaacacgagatcgaaacgatgattctgtccctggctgcaccggctgttcaggcgattccggaccgtcgtaaagccattgaaatcgcacgtcgcgctaatgatttcctggcagaagaagttgctaaacgtccggaccgctttctggcattcgcagcactgccgctgcaggatgtggacgcagctaccgaagaactgcaacgttgtgtcaacgatctgggcttcgtgggtgcgatggttaatggctttagccaggaaggcgatggtcaaaccccgctgtattacgacctgccgcagtatcgcccgttctggggtgaagtcgaaaaactggatgtgccgttttatctgcatccgcgtaacccgctgccgcaggattcccgtatctacgacggtcacccgtggctgctgggtccgacctgggcgttcgcccaagaaacggcggtgcatgccctgcgtctgatggcatctggcctgtttgatgaacacccgcgtctgaacattatcctgggtcatatgggcgaaggtctgccgtacatgatgtaccgtatcgatcatcgtatcgcatgggttaaagctccgccggattatccggcaaaacgtcgctttatggactacttcctcgaaaattttcacattaccacgtcaggcaacttccgtacccagacgctgattgatgcaatcctggaaattggtgctgatcgcatcctgttctcgaccgactggccgtttgaaaacattgatcatgccgctgactggtttaatgctacgtctattgccgaagctgaccgtgtcaaaatcggccgcaccaatgcccgtcgtctgttcaaactggatggccgt

SEQ ID NO: 960 - DNA, 984 bp, Artificial Sequence
  synthetic construct; Dicamba decarboxylase variant
atggctcaaggcaaagtggcactggaagaacatttcgcaatcccggaaacgctgaacgacgccgcagatttcgtcccgagcgagtacctgaaagaactgcagcatcgtctgctggatatccaagacactcgcctgaaactgatggataaacacgagatcgaaacgatgattctgtccctggctgcaccggctgttcaggcgattccggaccgtgtcaaagccattgaaatcgcacgtcgcgctaatgatttcctggcagaagaagttgctaaacgtccggaccgctttctggcattcgcagcactgccgctgcaggatcccgacgcagctaccgaagaactgcaacgttgtgtcaacgatctgggcttcgtgggtgcgatggttaatggctttagccaggaaggcgatggtcaaaccccgctgtattacgacctgccgcagtatcgcccgttctggggtgaagtcgaaaaactggatgtgccgttttatctgcatccgcgtaacccgctgccgcaggattcccgtatctacgacggtcacccgtggctgctgggtccgacctgggcgttcgcccaagaaacggcggtgcatgccctgcgtctgatggcatctggcctgtttgatgaacacccgcgtctgaacattatcctgggtcatatgggcgaaggtctgccgtacatgatgtaccgtatcgatcatcgtatcgcatgggttaaagctccgccggattatccggcaaaacgtcgctttatggactacttcctcgaaaattttcacattaccacgtcaggcaacttccgtacccagacgctgattgatgcaatcctggaaattggtgctgatcgcatcctgttctcgaccgactggccgtttgaaaacattgatcatgccgctgactggtttaatgctacgtctattgccgaagctgaccgtgtcaaaatcggccgcaccaatgcccgtcgtctgttcaaactggatggccgt

SEQ ID NO: 961 - DNA, 984 bp, Artificial Sequence
  synthetic construct; Dicamba decarboxylase variant
atggctcaaggcaaagtggcactggaagaacatttcgcaatcccggaaacgctgcaggacgccgcagatttcgtcccgagcgagtactggaaagaactgcagcatcgtctgctggatatccaagacactcgcctgaaactgatggataaacacgagatcgaaacgatgattctgtccctggctgcaccggctgttcaggcgattccggaccgtgtcaaagccattgaaatcgcacgtcgcgctaatgatttcctggcagaagaagttgctaaacgtccgggccgctttctggcattcgcagcactgccgctgcaggatgtggacgcagctaccgaagaactgcaacgttgtgtcaacgatctgggcttcgtgggtgcgatggttaatggctttagccaggaaggcgatggtcaaaccccgctgtattacgacctgccgcagtatcgcccgttctggggtgaagtcgaaaaactggatgtgccgttttatctgcatccgcgtaacccgctgccgcaggattcccgtatctacgacggtcacccgtggctgctgggtccgacctgggcgttcgcccaagaaacggcggtgcatgccctgcgtctgatggcatctggcctgtttgatgaacacccgcgtctgaacattatcctgggtcatatgggcgaaggtctgccgtacatgatgtaccgtatcgatcatcgtatcgcatgggttaaagctccgccggattatccggcaaaacgtcgctttatggactacttcctcgaaaattttcacattaccacgtcaggcaacttccgtacccagacgctgattgatgcaatcctggaaattggtgctgatcgcatcctgttctcgaccgactggccgtttgaaaacattgatcatgccgctgactggtttaatgctacgtctattgccgaagctgaccgtgtcaaaatcggccgcaccaatgcccgtcgtctgttcaaactggatggccgt

SEQ ID NO: 962 - DNA, 984 bp, Artificial Sequence
  synthetic construct; Dicamba decarboxylase variant
atggctcaaggcaaagtggcactggaagaacatttcgcaatcccggaaacgctgaacgacgccgcagggttcgtcccgagcgagtactggaaagaactgcagcatcgtctgctggatatccaagacactcgcctgaaactgatggataaacacgagatcgaaacgatgattctgtccctggctgcaccggctgttcaggcgattccggaccgtgtcaaagccattgaaatcgcacgtcgcgctaatgatttcctggcagaagaagttgctaaacgtccggaccgctttctggcattcgcagcactgccgctgcaggatcccgacgcagctaccgaagaactgcaacgttgtgtcaacgatctgggcttcgtgggtgcgctggttaatggctttagccaggaaggcgatggtcaaaccccgctgtattacgacctgccgcagtatcgcccgttctggggtgaagtcgaaaaactggatgtgccgttttatctgcatccgcgtaacccgctgccgcaggattcccgtatctacgacggtcacccgtggctgctgggtccgacctgggcgttcgcccaagaaacggcggtgcatgccctgcgtctgatggcatctggcctgtttgatgaacacccgcgtctgaacattatcctgggtcatatgggcgaaggtctgccgtacatgatgtaccgtatcgatcatcgtatcgcatgggttaaagctccgccggattatccggcaaaacgtcgctttatggactacttcctcgaaaattttcacattaccacgtcaggcaacttccgtacccagacgctgattgatgcaatcctggaaattggtgctgatcgcatcctgttctcgaccgactggccgtttgaaaacattgatcatgccgctgactggtttaatgctacgtctattgccgaagctgaccgtgtcaaaatcggccgcaccaatgcccgtcgtctgttcaaactggatggccgt

SEQ ID NO: 963 - DNA, 984 bp, Artificial Sequence
  synthetic construct; Dicamba decarboxylase variant
atggctcaaggcaaagtggcactggaagaacatttcgcaatcccggaaacgctgcaagacgccgcaggtttcgtcccgggcgactactggaaagaactgcagcatcgtctgctggatatccaagacactcgcctgaaagagatggataaacacgagatcggaacgatgattctgtccctggctgcaccggctgttcaggcgattccggaccgtcgcaaagccattgaaatcgcacgtcgcgctaatgatttcctggcagaagaagttgctaaacgtccggaccgctttctggcattcgcagcactgccgctgcaggatgtggacgcagctaccgaagaactgcaacgttgtgtcaacgatctgggcttcgtgggtgcgatggttaatggcttcagccaggaaggcgatggtcaaaccccgctgtattacgacctgccgcagtatcgcccgttctggggtgaagtcgaaaaactggatgtgccgttttatctgcatccgcgtaacccgctgccgcaggattcccgtatctacgacggtcacccgtggctgctgggtccgacctgggcgttcgcccaagaaacggcggtgcatgccctgcgtctgatggcatctggcctgtttgatgaacacccgcgtctgaacattatcctgggtcatatgggcgaaggtctgccgtacatgatgtaccgtatcgatcatcgtatcgcatgggttaaagctccgccggattatccggcaaaacgtcgctttatggactacttcctcgaaaattttcacattaccacgtcaggcaacttccgtacccagacgctgattgatgcaatcctggaaattggtgctgatcgcatcctgttctcgaccgactggccgtttgaaaacattgatcatgccgctgactggtttaatgctacgtctattgccgaagctgaccgtgtcaaaatcggccgcaccaatgcccgtcgtctgttcaaactggatggccgt

SEQ ID NO: 964 - DNA, 984 bp, Artificial Sequence
  synthetic construct; Dicamba decarboxylase variant
atggctcaaggcaaagtggcactggaagaacatttcgcaatcccggaaacgctgcaagacgccgcaggtttcgtcccgggcgactactggaaagaactgcagcatcgtctgctggatatccaagacactcgcctgaaagagatggatcgtcacgagatcggaacgatggttctgtccctggctgcaccggctgttcaggcgattccggaccgtcgcaaagccattgaaatcgcacgtcgcgctaatgatttcctggcagaagaagttgctaaacgtccggaccgctttctggcattcgcagcactgccgctgcaggatgtggacgcagctaccgaagaactgcaacgttgtgtcaacgatctgggcttcgtgggtgcgatggttaatggcttcagccaggaaggcgatggtcaaaccccgctgtattacgacctgccgcagtatcgcccgttctggggtgaagtcgaaaaactggatgtgccgttttatctgcatccgcgtaacccgctgccgcaggatgcccgtatctacgacggtcacccgtggctgctgggtccgacctgggcgttcgcccaagaaacggcggtgcatgccctgcgtctgatggcatctggcctgtttgatgaacacccgcgtctgaacattatcctgggtcatatgggcgaaggtctgccgtacatgatgtaccgtatcgatcatcgtatcgcatgggttaaagctccgccggattatccggcaaaacgtcgctttatggactacttcctcgaaaattttcacattaccacgtcaggcaacttccgtacccagacgctgattgatgcaatcctggaaattggtgctgatcgcatcctgttctcgaccgactggccgtttgaaaacattgatcatgccgctgactggtttgcggctacgtctattgccgaagctgaccgtgtcaaaatcggccgcaccaatgcccgtcgtctgttcaaactggatggaagt

SEQ ID NO: 965 - DNA, 984 bp, Artificial Sequence
  synthetic construct; Dicamba decarboxylase variant
atggctcaaggcaaagtggcactggaagaacatttcgcaatcccggaaacgctgcaagacgccgcaggtttcgtcccgggcgactactggaaagaactgcagcatcgtctgttggatatccaagacactcgcctgaaagagatggataaacacgggatcggaacgatggttctgtccctggctgcaccggctgttcaggcgattccggaccgtcgccaagccattgaacttgcacgtcgcgctaatgatttcctggcagaagaagttgctaaacgtccggaccgctttctggcattcgcagcactgccgctgcaggatgtggacgcagctaccgaagaactgcaacgttgtgtcaacgatctgggcttcgtgggtgcgatggttaatggcttcagccaggaaggcgatggtcaaaccccgctgtattacgacctgccgcagtatcgcccgttctggggtgaagtcgaaaaactggatgtgccgttttatctgcatccgcgtaacccgctgccgcaggattcccgtatctacgacggtcacccgtggctgctgggtccgacctgggcgttcgcccaagaaacggcggtgcatgccctgcgtctgatggcatctggcctgtttgatgaacacccgcgtctgaacattatcctgggtcatatgggcgaaggtctgccgtacatgatgtaccgtatcgatcatcgtatcgcatgggttaaagctccgccggattatccggcaaaacgtcgctttatggactacttcctcgaaaattttcacattaccacgtcaggcaacttccgtacccagacgctgattgatgcaatcctggaaattggtgctgatcgcatcctgttctcgaccgactggccgtttgaaaacattgatcatgccgctgactggtttaatgctacgtctattgccgaagctgaccgtgtcaaaatcggccgcaccaatgcccgtcgtctgttcaaactggatggccgt

SEQ ID NO: 966 - DNA, 984 bp, Artificial Sequence
  synthetic construct; Dicamba decarboxylase variant
atggctcaaggcaaagtggcactggaagaacatttcgcaatcccggaaacgctgcaagacgccgcaggtttcgtcccgggcgactactggaaagaactgcagcatcgtctgttggatatccaagacactcgcctgaaagagatggataaacacgggatcggaacgatggttctgtccctggctgcaccggctgttcaggcgattccggaccgtcgcaaagccattgaaattgcacgtcgcgctaatgatttcctggcagaagaagttgctaaacgtccggaccgctttctggcattcgcagcactgccgctgcaggatgtggacgcagctaccgaagaactgcaacgttgtgtcgccgatctgggcttcgtgggtgcgatggttaatggcttcagccaggaaggcgatggtcaaaccccgctgtattacgacctgccgcagtatcgcccgttctggggtgaagtcgaaaaactggatgtgccgttttatctgcatccgcgtaacccgctgccgcaggattcccgtatctacgacggtcacccgtggctgctgggtccgacctgggcgttcgcccaagaaacggcggtgcatgccctgcgtctgatggcatctggcctgtttgatgaacacccgcgtctgaacattatcctgggtcatatgggcgaaggtctgccgtacatgatgtaccgtatcgatcatcgtatcgcatgggttaaagctccgccggattatccggcaaaacgtcgctttatggactacttcctcgaaaattttcacattaccacgtcaggcaacttccgtacccagacgctgattgatgcaatcctggaaattggtgctgatcgcatcctgttctcgaccgactggccgtttgaaaacattgatcatgccgctgactggtttaatgctacgtctattgccgacgctgaccgtgacaaaatcggccgcaccaatgcccgtcgtctgttcaaactggatggacgt

SEQ ID NO: 967 - DNA, 984 bp, Artificial Sequence
  synthetic construct; Dicamba decarboxylase variant
atggctcaaggcaaagtggcactggaagaacatttcgcaatcccggaaacgctgcaagacgccgcaggtttcgtcccgggcgactactggaaagaactgcagcatcgtctgctggatatccaagacactcgcctgaaagagatggataaacacgagatcggaacgatggttctgtccctggctgcaccggctgttcaggcgattccggaccgtcgccaagccattgaacttgcacgtcgcgctaatgatttcctggcagaagaagttgctaaacgtccggaccgctttctggcattcgcagcactgccgctgcaggatgtggacgcagctaccgaagaactgcaacgttgtgtcaacgatctgggcttcgtgggtgcgatggttaatggcttcagccaggaaggcgatggtcaaaccccgctgtattacgacctgccgcagtatcgcccgttctggggtgaagtcgaaaaactggatgtgccgttttatctgcatccgcgtaacccgctgccgcaggattcccgtatctacgacggtcacccgtggctgctgggtccgacctgggcgttcgcccaagaaacggcggtgcatgccctgcgtctgatggcatctggcctgtttgatgaacacccgcgtctgaacattatcctgggtcatatgggcgaaggtctgccgtacatgatgtaccgtatcgatcatcgtatcgcatgggttaaagctccgccggattatccggcaaaacgtcgctttatggactacttcctcgaaaattttcacattaccacgtcaggcaacttccgtacccagacgctgattgatgcaatcctggaaattggtgctgatcgcatcctgttctcgaccgactggccgtttgaaaacattgatcatgccgctgactggtttaatgctacgtctattgccgaagctgaccgtgtcaaaatcggccgcaccaatgcccgtcgtctgttcaaactggatggccgt

SEQ ID NO: 968 - DNA, 984 bp, Artificial Sequence
  synthetic construct; Dicamba decarboxylase variant
atggctcaaggcaaagtggcactggaagaacatttcgcaatcccggaaacgctgcaagacgccgcaggtttcgtcccgggcgactactggaaagaactgcagcatcgtctgttggatatccaagacgagcgcctgaaagagatggataaacacgagatcggaacgatgattctgtccctggctgcaccggccgttcaggcgattccggaccgtcgcaaagccattgaacttgcacgtcgcgctaatgatttcctggcagaagaagttgctaaacgtccggaccgctttctggcattcgcagcactgccgctgcaggatgtggacgcagctaccgaagaactgcaacgttgtgtcaacgatctgggcttcgtgggtgcgatggttaatggcttcagccaggaaggcgatggtcaaaccccgctgtattacgacctgccgcagtatcgcccgttctggggtgaagtcgaaaaactggatgtgccgttttatctgcatccgcgtaacccgctgccgcaggattcccgtatctacgacggtcacccgtggctgctgggtccgacctgggcgttcgcccaagaaacggcggtgcatgccctgcgtctgatggcatctggcctgtttgatgaacacccgcgtctgaacattatcctgggtcatatgggcgaaggtctgccgtacatgatgtaccgtatcgatcatcgtatcgcatgggttaaagctccgccggattatccggcaaaacgtcgctttatggactacttcctcgaaaattttcacattaccacgtcaggcaacttccgtacccagacgctgattgatgcaatcctggaaattggtgctgatcgcatcctgttctcgaccgactggccgtttgaaaacattgatcatgccgctgactggtttaatgctacgtctattgccgaagctgaccgtgtcaaaatcggccgcaccaatgcccgtcgtctgttcaaactggatggccgt

SEQ ID NO: 969 - DNA, 984 bp, Artificial Sequence
  synthetic construct; Dicamba decarboxylase variant
atggctcaaggcaaagtggcactggaagaacatttcgcaatcccggaaacgctgcaagacgccgcaggtttcgtcccgggcgactactggaaagaactgcagcatcgtctgctggatatccaagacactcgcctgaaagagatggataaacacgagatcggaacgatggttctgtccctggctgcaccggctgttcaggcgattccggaccgtcgcaaagccattgaaattgcacgtcgcgctaatgatttcctggcagaagaagttgctaaacgtccggaccgctttctggcattcgcagcactgccgctgcaggatgtggacgcagctaccgaagaactgcaacgttgtgtcaacgatctgggcttcgtgggtgcgatggttaatggcttcagccaggaaggcgatggtcaaaccccgctgtattacgacctgccgcagtatcgcccgttctggggtgaagtcgaaaaactggatgtgccgttttatctgcatccgcgtaacccgctgccgcaggattcccgtatctacgacggtcacccgtggctgctgggtccgacctgggcgttcgcccaagaaacggcggtgcatgccctgcgtctgatggcatctggcctgtttgatgaacacccgcgtctgaacattatcctgggtcatatgggcgaaggtctgccgtacatgatgtaccgtatcgatcatcgtatcgcatgggttaaagctccgccggattatccggcaaaacgtcgctttatggactacttcctcgaaaattttcacattaccacgtcaggcaacttccgtacccagacgctgattgatgcaatcctggaaattggtgctgatcgcatcctgttctcgaccgactggccgtttgaaaacattgatcatgccgctgactggtttaatgctacgtctattgccgaagctgaccgtgtcaaaatcggccgcaccaatgcccgtcgtctgttcaaactggatggccgt

SEQ ID NO: 970 - DNA, 984 bp, Artificial Sequence
  synthetic construct; Dicamba decarboxylase variant
atggctcaaggcaaagtggcactggaagaacatttcgcaatcccggaaacgctgcaagacgccgcaggtttcgtcccgggcgactactggaaagaactgcagcatcgtctgctggatatccaagacactcgcctgaaagagatggataaacacgagatcggaacgatgattctgtccctggctgcaccggctgttcaggcgattccggaccgtcgcaaagccattgagatcgcacgtcgcgctaatgatttcctggcagaagaagttgctaaacgtccggaccgctttctggcattcgcagcactgccgctgcaggatgtggacgcagctaccgaagaactgcaacgttgtgtcaacgatctgggcttcgtgggtgcgatggttaatggcttcagccaggaaggcgatggtcaaaccccgctgtattacgacctgccgcagtatcgcccgttctggggtgaagtcgaaaaactggatgtgccgttttatctgcatccgcgtaacccgctgccgcaggatgcccgtatctacgacggtcacccgtggctgctgggtccgacctgggcgttcgcccaagaaacggcggtgcatgccctgcgtctgatggcatctggcctgtttgatgaacacccgcgtctgaacattatcctgggtcatatgggcgaaggtctgccgtacatgatgtaccgtatcgatcatcgtatcgcatgggttaaagctccgccggattatccggcaaaacgtcgctttatggactacttcctcgaaaattttcacattaccacgtcaggcaacttccgtacccagacgctgattgatgcaatcctggaaattggtgctgatcgcatcctgttctcgaccgactggccgtttgaaaacattgatcatgccgctgactggtttaatgctacgtctattgccgaagctgaccgtgtcaaaatcggccgcaccaatgcccgtcgtctgttcaaactggatggccgt

SEQ ID NO: 971 - DNA, 984 bp, Artificial Sequence
  synthetic construct; Dicamba decarboxylase variant
atggctcaaggcaaagtggcactggaagaacatttcgcaatcccggaaacgctgcaagacgccgcaggtttcgtcccgggtgactactggaaagaactgcagcatcgtctgctggatatccaagacactcgcctgaaagagatggataaacacgggatcggaacgatgattctgtccctggctgcaccggctgttcaggcgattccggaccgtcgcaaagccattgaacttgcacgtcgcgctaatgatttcctggcagaagaagttgctaaacgtccggaccgctttctggcattcgcagcactgccgctgcaggatgtggacgcagctaccgaagaactgcaacgttgtgtcaacgatctgggcttcgtgggtgcgatggttaatggcttcagccaggaaggcgatggtcaaaccccgctgtattacgacctgccgcagtatcgcccgttctggggtgaagtcgaaaaactggatgtgccgttttatctgcatccgcgtaacccgctgccgcaggattcccgtatctacgacggtcacccgtggctgctgggtccgacctgggcgttcgcccaagaaacggcggtgcatgccctgcgtctgatggcatctggcctgtttgatgaacacccgcgtctgaacattatcctgggtcatctgggcgaaggtctgccgtacatgatgtaccgtatcgatcatcgtatcgcatgggttaaagctccgccggattatccggcaaaacgtcgctttatggactacttcctcgaaaattttcacattaccacgtcaggcaacttccgtacccagacgctgattgatgcaatcctggaaattggtgctgatcgcatcctgttctcgaccgactggccgtttgaaaacattgatcatgccgctgactggtttaatgctacgtctattgccgaagctgaccgtgtcaaaatcggccgcaccaatgcccgtcgtctgttcaaactggatgtacgt

SEQ ID NO: 972 - DNA, 984 bp, Artificial Sequence
  synthetic construct; Dicamba decarboxylase variant
atggctcaaggcctggtggcactggaagaacatttcgcaatcccggaaacgctgaatgacgccgcaggtttcgtcccgggcgactactggaaagaactgcagcatcgtctgctggatatccaagacactcgcctgaaagagatggataaacacgagatcggaacgatggttctgtccctggctgcaccggctgttcaggcgattccggaccgtcgcaaagccattgaacttgcaaaacgcgctaatgatttcctggcagaagaagttgctaaacgtccggaccgctttctggcattcgcagcactgccgctgcaggatgtggacgcagctaccgaagaactgcaacgttgtgtcgccgatctgggcttcgtgggtgcgatggttaatggcttcagccaggaaggcgatggtcaaaccccgctgtattacgacctgccgcagtatcgcccgttctggggtgaagtcgaaaaactggatgtgccgttttatctgcatccgcgtaacccgctgccgcaggattcccgtatctacgacggtcacccgtggctgctgggtccgacctgggcgttcgcccaagaaacggcggtgcatgccctgcgtctgatggcatctggcctgtttgatgaacacccgcgtctgaacattatcctgggtcatatgggcgaaggtctgccgtacatgatgtaccgtatcgatcatcgtatcgcatgggttaaagctccgccggattatccggcaaaacgtcgctttatggactacttcctcgaaaattttcacattaccacgtcaggcaacttccgtacccagacgctgattgatgcaatcctggaaattggtgctgatcgcatcctgttctcgaccgactggccgtttgaaaacattgatcatgccgctgactggtttaatgctacgtctattgccgaagctgaccgtgtcaaaatcggccgcaccaatgcccgtcgtctgttcaaactggatggccgt

SEQ ID NO: 973 - DNA, 984 bp, Artificial Sequence
  synthetic construct; Dicamba decarboxylase variant
atggctcaaggcaaagtggcactggaagaacatttcgcaatcccggaaacgctgcaagacgccgcaggtttcgtcccgggcgactactggaaagaactgcagcatcgtctgctggatatccaagacactcgcctgaaagagatggataaacacgagatcggaacgatggttctgtccctggctgcaccggctgttcaggcgattccggaccgtcgcaaagccattgaaatcgcacgtcgcgctaatgatttcctggcagaagaagttgctaaacgtccggaccgctttctggcattcgcagcactgccgatgcaggatccagaagcagctacctccgaactgcaacgttgtgtcaacgatctgggcttcgtgggtgcgatggttaatggcttcagccaggaaggcgatggtcaaaccccgctgtattacgacctgccgcagtatcgcccgttctggggtgaagtcgaaaaactggatgtgccgttttatctgcatccgcgtaacccgctgccgcaggattcccgtatctacgacggtcacccgtggctgctgggtccgacctgggcgttcgcccaagaaacggcggtgcatgccctgcgtctgatggcatctggcctgtttgatgaacacccgcgtctgaacattatcctgggtcatatgggcgaaggtctgccgtacatgatgtaccgtatcgatcatcgtatcgcatgggttaaagctccgccggattatccggcaaaacgtcgctttatggactacttcctcgaaaattttcacattaccacgtcaggcaacttccgtacccagacgctgattgatgcaatcctggaaattggtgctgatcgcatcctgttctcgaccgactggccgtttgaaaacattgatcatgccgctgactggtttaatgctacgtctattgccgaagctgaccgtgtcaaaatcggccgcaccaatgcccgtcgtctgttcaaactggatggccgt

SEQ ID NO: 974 - DNA, 984 bp, Artificial Sequence
  synthetic construct; Dicamba decarboxylase variant
atggctcaaggcaaagtggcactggaagaacatttcgcaatcccggaaacgctgaatgacgccgcaggtttcgtcccgggcgactactggaaagaactgcagcatcgtctgatggatatccaagacactcgcctgaaagagatggataaacacgagatcggaacgatggttctgtccctggctgcaccggctgttcaggcgattccggaccgtcgcaaagccattgaaatcgcacgtcgcgctaatgatttcctggcagaagaagttgctaaacgtccggaccgctttctggcattcgcagcactgccgatgcaggatgtcgacgcagctacctccgaactgcaacgttgtgtcaacgatctgggcttcgtgggtgcgatggttaatggcttcagccaggaaggcgatggtcaaaccccgctgtattacgacctgccgcagtatcgcccgttctggggtgaagtcgaaaaactggatgtgccgttttatctgcatccgcgtaacccgctgccgcaggattcccgtatctacgacggtcacccgtggctgctgggtccgacctgggcgttcgcccaagaaacggcggtgcatgccctgcgtctgatggcatctggcctgtttgatgaacacccgcgtctgaacattatcctgggtcatatgggcgaaggtctgccgtacatgatgtaccgtatcgatcatcgtatcgcatgggttaaagctccgccggattatccggcaaaacgtcgctttatggactacttcctcgaaaattttcacattaccacgtcaggcaacttccgtacccagacgctgattgatgcaatcctggaaattggtgctgatcgcatcctgttctcgaccgactggccgtttgaaaacattgatcatgccgctgactggtttaatgctacgtctattgccgaagctgaccgtgtcaaaatcggccgcaccaatgcccgtcgtctgttcaaactggatggaagt

SEQ ID NO: 975 - DNA, 984 bp, Artificial Sequence
  synthetic construct; Dicamba decarboxylase variant
atggctcaaggcctggtggcactggaagaacatttcgcaatcccggaaacgctgaatgacgccgcaggtttcgtcccgggcgactactggaaagaactgcagcatcgtctgttggatatccaagacactcgcctgaaagagatggataaacacgggatcggaacgatgattctgtccctggctgcaccggctgttcaggcgattccggaccgtcgccaagccattgaacttgcacgtcgcgctaatgatttcctggcagaagaagttgctaaacgtccggaccgctttctggcattcgcagcactgccgctgcaggatgtggacgcagctaccgaagaactgcaacgttgtgtcgccgatctgggcttcgtgggtgcgatggttaatggcttcagccaggaaggcgatggtcaaaccccgctgtattacgacctgccgcagtatcgcccgttctggggtgaagtcgaaaaactggatgtgccgttttatctgcatccgcgtaacccgctgccgcaggattcccgtatctacgacggtcacccgtggctgctgggtccgacctgggcgttcgcccaagaaacggcggtgcatgccctgcgtctgatggcatctggcctgtttgatgaacacccgcgtctgaacattatcctgggtcatatgggcgaaggtctgccgtacatgatgtaccgtatcgatcatcgtatcgcatgggttaaagctccgccggattatccggcaaaacgtcgctttatggactacttcctcgaaaattttcacattaccacgtcaggcaacttccgtacccagacgctgattgatgcaatcctggaaattggtgctgatcgcatcctgttctcgaccgactggccgtttgagaacattgatcatgccgctgactggtttaatgctacgtctattgccgaagctgaccgtgtcaaaatcggccgcaccaatgcccgtcgtctgttcaaactggatggccgt

SEQ ID NO: 976 - DNA, 984 bp, Artificial Sequence
  synthetic construct; Dicamba decarboxylase variant
atggctcaaggcctggtggcactggaagaacatttcgcaatcccggaaacgctgcaagacgccgcaggtttcgtcccgggcgactactggaaagaactgcagcatcgtctgctggatatccaagacactcgcctgaaagagatggataaacacgagatcggaacgatgattctgtccctggctgcaccggctgttcagggtattccggaccgtcgcaaagccattgaaattgcacgtcgcgctaatgatttcctggcagaagaagttgctaaacgtccggaccgctttctggcattcgcagcactgccgctgcaggatgtggacgcagctaccgaagaactgcaacgttgtgtcaacgatctgggcttcgtgggtgcgatggttaatggcttcagccaggaaggcgatggtcaaaccccgctgtattacgacctgccgcagtatcgcccgttctggggtgaagtcgaaaaactggatgtgccgttttatctgcatccgcgtaacccgctgccgcaggattcccgtatctacgacggtcacccgtggctgctgggtccgacctgggcgttcgcccaagaaacggcggtgcatgccctgcgtctgatggcatctggcctgtttgatgaacacccgcgtctgaacattatcctgggtcatatgggcgaaggtctgccgtacatgatgtaccgtatcgatcatcgtatcgcatgggttaaagctccgccggattatccggcaaaacgtcgctttatggactacttcctcgaaaattttcacattaccacgtcaggcaacttccgtacccagacgctgattgatgcaatcctggaaattggtgctgatcgcatcctgttctcgaccgactggccgtttgaaaacattgatcatgccgctgactggtttaatgctacgtctattgccgaagctgaccgtgtcaaaatcggccgcaccaatgcccgtcgtctgttcaaactggatggccgt

SEQ ID NO: 977 - DNA, 984 bp, Artificial Sequence
  synthetic construct; Dicamba decarboxylase variant
atggctcaaggcctggtggcactggaagaacatttcgcaatcccggaaacgctgcaagacgccgcaggtttcgtcccgggcgactactggaaagaactgcagcatcgtctgctggatatccaagacactcgcctgaaagagatggataaacacgagatcggaacgatgattctgtccctggctgcaccggctgttcaggcgattccggaccgtcgcaaagccattgaaatcgcacgtcgcgctaatgatttcctggcagaagaagttgctaaacgtccggaccgctttctggcattcgcagcactgccgctgcaggatgtggacgcagctaccgaagaactgcaacgttgtgtcaacgatctgggcttcgtgggtgcgatggttaatggcttcagccaggaaggcgatggtcaaaccccgctgtattacgacctgccgcagtatcgcccgttctggaaagaagtcgaaaaactggatgtgccgttttatctgcatccgcgtaacccgctgccgcaggattcccgtatctacgacggtcacccgtggctgctgggtccgacctgggcgttcgcccaagaaacggcggtgcatgccctgcgtctgatggcatctggcctgtttgatgaacacccgcgtctgaacattatcctgggtcatatgggcgaaggtctgccgtacatgatgtaccgtatcgatcatcgtatcgcatgggttaaagctccgccgcgttatccggcaaaacgtcgctttatggactacttcctcgaaaattttcacattaccacgtcaggcaacttccgtacccagacgctgattgatgcaatcctggaaattggtgctgatcgcatcctgttctcgaccgactggccgtttgaaaacattgatcatgccgctgactggtttaatgctacgtctattgccgaagctgaccgtgtcaaaatcggccgcaccaatgcccgtcgtctgttcaaactggatggacgt

SEQ ID NO: 978 - DNA, 984 bp, Artificial Sequence
  synthetic construct; Dicamba decarboxylase variant
atggctcaaggcctggtggcactggaagaacatttcgcaatcccggaaacgctgcaagacgccgcaggtttcgtcccgggcgactactggaaagaactgcagcatcgtctgctggatatccaagacactcgcctgaaagagatggataaacacgagatcggaacgatgattctgtccctggctgcaccggctgttcaggcgattccggaccgtcgcaaagccattgaaatcgcacgtcgcgctaatgatttcctggcagaagaagttgctaaacgtccggaccgctttctggcattcgcagcactgccgatgcaggatgtcgaagcagctacctccgaactgcaacgttgtgtcaacgatctgggcttcgtgggtgcgatggttaatggcttcagccaggaaggcgatggtcaaaccccgctgtattacgacctgccgcagtatcgcccgttctggaaagaagtcgaaaaactggatgtgccgttttatctgcatccgcgtaacccgctgccgcaggattcccgtatctacgacggtcacccgtggctgctgggtccgacctgggcgttcgcccaagaaacggcggtgcatgccctgcgtctgatggcatctggcctgtttgatgaacacccgcgtctgaacattatcctgggtcatatgggcgaaggtctgccgtacatgatgtaccgtatcgatcatcgtatcgcatgggttaaagctccgccggattatccggcaaaacgtcgctttatggactacttcctcgaaaattttcacattaccacgtcaggcaacttccgtacccagacgctgattgatgcaatcctggaaattggtgctgatcgcatcctgttctcgaccgactggccgtttgaaaacattgatcatgccgctgactggtttaatgctacgtctattgccgaagctgaccgtgtcaaaatcggccgcaccaatgcccgtcgtctgttcaaactggatggccgt

SEQ ID NO: 979 - DNA, 984 bp, Artificial Sequence
  synthetic construct; Dicamba decarboxylase variant
atggctcaaggcctggtggcactggaagaacatttcgcaatcccggaaacgctgcaagacgccgcaggtttcgtcccgggcgactactggaaagaactgcagcatcgtctgatggatatccaagacgagcgcctgaaagagatggataaacacgggatcggaacgatgattctgtccctggctgcaccggctgttcaggcgattccggaccgtcgcaaagccattgaaatcgcacgtcgcgctaatgatttcctggcagaagaagttgctaaacgtccggaccgctttctggcattcgcagcactgccgctgcaggatgtggacgcagctacctccgaactgcaacgttgtgtcgccgatctgggcttcgtgggtgcgatggttaatggcttcagccaggaaggcgatggtcaaaccccgctgtattacgacctgccgcagtatcgcccgttctggggtgaagtcgaaaaactggatgtgccgttttatctgcatccgcgtaacccgctgccgcaggattcccgtatctacgacggtcacccgtggctgctgggtccgacctgggcgttcgcccaagaaacggcggtgcatgccctgcgtctgatggcatctggcctgtttgatgaacacccgcgtctgaacattatcctgggtcatatgggcgaaggtctgccgtacatgatgtaccgtatcgatcatcgtatcgcatgggttaaagctccgccggattatccggcaaaacgtcgctttatggactacttcctcgaaaattttcacattaccacgtcaggcaacttccgtacccagacgctgattgatgcaatcctggaaattggtgctgatcgcatcctgttctcgaccgactggccgtttgaaaacattgatcatgccgctgactggtttaatgctacgtctattgccgaagctgaccgtgtcaaaatcggccgcaccaatgcccgtcgtctgttcaaactggattggacg

SEQ ID NO: 980 - DNA, 984 bp, Artificial Sequence
  synthetic construct; Dicamba decarboxylase variant
atggctcaaggcctggtggcactggaagaacatttcgcaatcccggaaacgctgaatgacgccgcaggtttcgtcccgggcgactactggaaagaactgcagcatcgtctgatggatatgcaagacactcgcctgaaagagatggataaacacgagatcggaacgatgattctgtccctggctgcaccggctgttcaggcgattccggaccgtcgcaaagccattgaaattgcaaaacgcgctaatgatttcctggcagaagaagttgctaaacgtccggaccgctttctggcattcgcagcactgccgatgcaggatccagaagcagctaccgaagaactgcaacgttgtgtcaacgatctgggcttcgtgggtgcgatggttaatggcttcagccaggaaggcgatggtcaaaccccgctgtattacgacctgccgcagtatcgcccgttctggggtgaagtcgaaaaactggatgtgccgttttatctgcatccgcgtaacccgctgccgcaggattcccgtatctacgacggtcacccgtggctgctgggtccgacctgggcgttcgcccaagaaacggcggtgcatgccctgcgtctgatggcatctggcctgtttgatgaacacccgcgtctgaacattatcctgggtcatatgggcgaaggtctgccgtacatgatgtaccgtatcgatcatcgtatcgcatgggttaaagctccgccggattatccggcaaaacgtcgctttatggactacttcctcgaaaattttcacattaccacgtcaggcaacttccgtacccagacgctgattgatgcaatcctggaaattggtgctgatcgcatcctgttctcgaccgactggccgtttgaaaacattgatcatgccgctgactggtttaatgctacgtctattgccgaagctgaccgtgtcaaaatcggccgcaccaatgcccgtcgtctgttcaaactggatggccgt

SEQ ID NO: 981 - DNA, 984 bp, Artificial Sequence
  synthetic construct; Dicamba decarboxylase variant
atggctcaaggcaaagtggcactggaagaacatttcgcaatcccggaaacgctgcaagacgccgcaggtttcgtcccgggcgactactggaaagaactgcagcatcgtctgctggatatccaagacactcgcctgaaagagatggataaacacgagatcggaacgatgattctgtccctggctgcaccggctgttcaggcgattccggaccgtcgcaaagccattgaaatcgcacgtcgcgctaatgatttcctggcagaagaagttgctaaacgtccggaccgctttctggcattcgcagcactgccgctgcaggatgtggacgcagctaccgaagaactgcaacgttgtgtcaacgatctgggcttcgtgggtgcgatggttaatggcttcagccaggaaggcgatggtcaaaccccgctgtattacgacctgccgcagtatcgcccgttctggggtgaagtcgaaaaactggatgtgccgttttatctgcatccgcgtaacccgctgccgcaggattcccgtatctacgacggtcacccgtggctgctgggtccgacctgggcgttcgcccaagaaacggcggtgcatgccctgcgtctgatggcatctggcctgtttgatgaacacccgcgtctgaacattatcctgggtcatatgggcgaaggtctgccgtacatgatgtaccgtatcgatcatcgtatcgcatgggttaaagctccgccggattatccggcaaaacgtcgctttatggactacttcctcgaaaattttcacattaccacgtcaggcaacttccgtacccagacgctgattgatgcaatcctggaaattggtgctgatcgcatcctgttctcgaccgactggccgtttgaaaacattgatcatgccgctgactggtttaatgctacgtctattgccgaagctgaccgtgtcaaaatcggccgcaccaatgcccgtcgtctgttcaaactggatgtaagt

SEQ ID NO: 982 - DNA, 984 bp, Artificial Sequence
  synthetic construct; Dicamba decarboxylase variant
atggctcaaggcaaagtggcactggaagaacatttcgcaatcccggaaacgctgcaagacgccgcaggtttcgtcccgggcgactactggaaagaactgcagcatcgtctgctggatatccaagacactcgcctgaaagagatggataaacacgagatcggaacgatggttctgtccctggctgcaccggctgttcaggcgattccggaccgtcgcaaagccattgaaatcgcacgtcgcgctaatgatttcctggcagaagaagttgctaaacgtccggaccgctttctggcattcgcagcactgccgctgcaggatccagacgcagctaccgaagaactgcaacgttgtgtcaacgatctgggcttcgtgggtgcgatggttaatggcttcagccaggaaggcgatggtcaaaccccgctgtattacgacctgccgcagtatcgcccgttctggggtgaagtcgaaaaactggatgtgccgttttatctgcatccgcgtaacccgctgccgcaggattcccgtatctacgacggtcacccgtggctgctgggtccgacctgggcgttcgcccaagaaacggcggtgcatgccctgcgtctgatggcatctggcctgtttgatgaacacccgcgtctgaacattatcctgggtcatatgggcgaaggtctgccgtacatgatgtaccgtatcgatcatcgtatcgcatgggttaaagctccgccggattatccggcaaaacgtcgctttatggactacttcctcgaaaattttcacattaccacgtcaggcaacttccgtacccagacgctgattgatgcaatcctggaaattggtgctgatcgcatcctgttctcgaccgactggccgtttgaaaacattgatcatgccgctgactggtttaatgctacgtctattgccgaagctgaccgtgtcaaaatcggccgcaccaatgcccgtcgtctgttcaaactggatggccgt

SEQ ID NO: 983 - DNA, 984 bp, Artificial Sequence
  synthetic construct; Dicamba decarboxylase variant
atggctcaaggcctggtggcactggaagaacatttcgcaatcccggaaacgctgcaagacgccgcaggtttcgtcccgggcgactactggaaagaactgcagcatcgtctgctggatatccaagacactcgcctgaaagagatggataaacacgagatcggaacgatgattctgtccctggctgcaccggctgttcaggcgattccggaccgtcgcaaagccattgaaatcgcacgtcgcgctaatgatttcctggcagaagaagttgctaaacgtccggaccgctttctggcattcgcagcactgccgttgcaggatgtggacgcagctaccgaagaactgcaacgttgtgtcgccgatctgggcttcgtgggtgcgatggttaatggcttcagccaggaaggcgatggtcaaaccccgctgtattacgacctgccgcagtatcgcccgttctggggtgaagtcgaaaaactggatgtgccgttttatctgcatccgcgtaacccgctgccgcaggattcccgtatctacgacggtcacccgtggctgctgggtccgacctgggcgttcgcccaagaaacggcggtgcatgccctgcgtctgatggcatctggcctgtttgatgaacacccgcgtctgaacattatcctgggtcatatgggcgaaggtctgccgtacatgatgtaccgtatcgatcatcgtatcgcatgggttaaagctccgccggattatccggcaaaacgtcgctttatggactacttcctcgaaaatttttggattaccacgtcaggcaacttccgtacccagacgctgattgatgcaatcctggaaattggtgctgatcgcatcctgttctcgaccgactggccgtttgaaaacattgatcatgccgctgactggtttaatgctacgtctattgccgaagctgaccgtgtcaaaatcggccgcaccaatgcccgtcgtctgttcaaactggatggccgt

SEQ ID NO: 984 - DNA, 984 bp, Artificial Sequence
  synthetic construct; Dicamba decarboxylase variant
atggctcaaggcctggtggcactggaagaacatttcgcaatcccggaaacgctgcaagacgccgcaggtttcgtcccgggcgactactggaaagaactgcagcatcgtctgctggatatccaagacactcgcctgaaagagatggatcgtcacgagatcggaacgatggttctgtccctggctgcaccggctgttcaggcgattccggaccgtcgccaagccattgaacttgcacgtcgcgctaatgatttcctggcagaagaagttgctaaacgtccggaccgctttctggcattcgcagcactgccgatgcaggatgtcgaagcagctaccgaagaactgcaacgttgtgtcaacgatctgggcttcgtgggtgcgatggttaatggcttcagccaggaaggcgatggtcaaaccccgctgtattacgacctgccgcagtatcgcccgttctggggtgaagtcgaaaaactggatgtgccgttttatctgcatccgcgtaacccgctgccgcaggattcccgtatctacgacggtcacccgtggctgctgggtccgacctgggcgttcgcccaagaaacggcggtgcatgccctgcgtctgatggcatctggcctgtttgatgaacacccgcgtctgaacattatcctgggtcatatgggcgaaggtctgccgtacatgatgtaccgtatcgatcatcgtatcgcatgggttaaagctccgccggattatccggcaaaacgtcgctttatggactacttcctcgaaaattttcacattaccacgtcaggcaacttccgtacccagacgctgattgatgcaatcctggaaattggtgctgatcgcatcctgttctcgaccgactggccgtttgaaaacattgatcatgccgctgactggtttaatgctacgtctattgccgaagctgaccgtgtcaaaatcggccgcaccaatgcccgtcgtctgttcaaactggatggccgt

SEQ ID NO: 985 - DNA, 984 bp, Artificial Sequence
  synthetic construct; Dicamba decarboxylase variant
atggctcaaggcctggtggcactggaagaacatttcgcaatcccggaaacgctgcaagacgccgcaggtttcgtcccgggctgctactggaaagaactgcagcatcgtctgttggatatccaagacactcgcctgaaagagatggataaacacgagatcggaacgatgattctgtccctggctgcaccggctgttcaggcgattccggaccgtcgcaaagccattgaaatcgcacgtcgcgctaatgatttcctggcagaagaagttgctaaacgtccggaccgctttctggcattcgcagcactgccgctgcaggatgtggacgcagctaccgaagaactgcaacgttgtgtcaacgatctgggcttcgtgggtgcgatggttaatggcttcagccaggaaggcgatggtcaaaccccgctgtattacgacctgccgcagtatcgcccgttctggggtgaagtcgaaaaactggatgtgccgttttatctgcatccgcgtaacccgctgccgcaggattcccgtatctacgacggtcacccgtggctgctgggtccgacctgggcgttcgcccaagaaacggcggtgcatgccctgcgtctgatggcatctggcctgtttgatgaacacccgcgtctgaacattatcctgggtcatatgggcgaaggtctgccgtacatgatgtaccgtatcgatcatcgtatcgcatgggttaaagctccgccggattatccggcaaaacgtcgctttatggactacttcctcgaaaattttcacattaccacgtcaggcaacttccgtacccagacgctgattgatgcaatcctggaaattggtgctgatcgcatcctgttctcgaccgactggccgtttgaaaacattgatcatgccgctgactggtttaatgctacgtctattgccgaagctgaccgtgtcaaaatcggccgcaccaatgcccgtcgtctgttcaaactggatggaagt

SEQ ID NO: 986 - DNA, 984 bp, Artificial Sequence
  synthetic construct; Dicamba decarboxylase variant
atggctcaaggcaaagtggcactggaagaacatttcgcaatcccggaaacgctgcaagacgccgcaggtttcgtcccgggcgactactggaaagaactgcagcatcgtctgctggatatccaagacactcgcctgaaagagatggataaacacgagatcggaacgatggttctgtccctggctgcaccggctgttcaggcgattccggaccgtcgcaaagccattgaacttgcacgtcgcgctaatgatttcctggcagaagaagttgctaaacgtccggaccgctttctggcattcgcagcactgccgctgcaggatgtggacgcagctaccgaagaactgcaacgttgtgtcaacgatctgggcttcgtgggtgcgatggttaatggcttcagccaggaaggcgatggtcaaaccccgctgtattacgacctgccgcagtatcgcccgttctggggtgaagtcgaaaaactggatgtgccgttttatctgcatccgcgtaacccgctgccgcaggatgcccgtatctacgacggtcacccgtggctgctgggtccgacctgggcgttcgcccaagaaacggcggtgcatgccctgcgtctgatggcatctggcctgtttgatgaacacccgcgtctgaacattatcctgggtcatatgggcgaaggtctgccgtacatgatgtaccgtatcgatcatcgtatcgcatgggttaaagctccgccggattatccggcaaaacgtcgctttatggactacttcctcgaaaattttcacattaccacgtcaggcaacttccgtacccagacgctgattgatgcaatcctggaaattggtgctgatcgcatcctgttctcgaccgactggccgtttgaaaacattgatcatgccgctgactggtttaatgctacgtctattgccgaagctgaccgtgtcaaaatcggccgcaccaatgcccgtcgtctgttcaaactggatggccgt

SEQ ID NO: 987 - DNA, 984 bp, Artificial Sequence
  synthetic construct; Dicamba decarboxylase variant
atggctcaaggcaaagtggcactggaagaacatttcgcaatcccggaaacgctgcaagacgccgcaggtttcgtcccgggctgctactggaaagaactgcagcatcgtctgctggatatccaagacacgcgcctgaaagagatggataaacacgagatcggaacgatgattctgtccctggctgcaccggctgttcaggcgattccggaccgtcgcaaagccattgaaatcgcacgtcgcgctaatgatttcctggcagaagaagttgctaaacgtccggaccgctttctggcattcgcagcactgccgctgcaggatgtggacgcagctaccgaagaactgcaacgttgtgtcgccgatctgggcttcgtgggtgcgatggttaatggcttcagccaggaaggcgatggtcaaaccccgctgtattacgacctgccgcagtatcgcccgttctggggtgaagtcgaaaaactggatgtgccgttttatctgcatccgcgtaacccgctgccgcaggatgcccgtatctacgacggtcacccgtggctgctgggtccgacctgggcgttcgcccaagaaacggcggtgcatgccctgcgtctgatggcatctggcctgtttgatgaacacccgcgtctgaacattatcctgggtcatatgggcgaaggtctgccgtacatgatgtaccgtatcgatcatcgtatcgcatgggttaaagctccgccggattatccggcaaaacgtcgctttatggactacttcctcgaaaattttcacattaccacgtcaggcaacttccgtacccagacgctgattgatgcaatcctggaaattggtgctgatcgcatcctgttctcgaccgactggccgtttgaaaacattgatcatgccgctgactggtttaatgctacgtctattgccgaagctgaccgtgtcaaaatcggccgcaccaatgcccgtcgtctgttcaaactggatggacgt

SEQ ID NO: 988 - DNA, 984 bp, Artificial Sequence
  synthetic construct; Dicamba decarboxylase variant
atggctcaaggactggtggcactggaagaacatttcgcaatcccggaaacgctgcaagacgccgcgggtttcgtcccgggcgactactggaaagaactgcagcatcgtctgctggatatccaagacactcgcctgaaagagatggataaacacgagatcggaacgatgattctgtccctggctgcaccggctgttcaggcgattccggaccgtcgcaaagccattgaaatcgcacgtcgcgctaatgatttcctggcagaagaagttgctaaacgtccggaccgctttctggcattcgcagcactgccgctgcaggatgtggacgcagctaccgaagaactgcaacgttgtgtcaacgatctgggcttcgtgggtgcgatggttaatggcttcagtcaggaaggcgatggtcaaaccccgctgtattacgacctgccgcagtatcgcccgttctggggtgaagtcgaaaaactggatgtgccgttttatctgcatccgcgtaacccgctgccgcaggattcccgtatctacgacggtcacccgtggctgctgggtccgacctgggcgttcgcccaagaaacggcggtgcatgccctgcgtctgatggcatctggcctgtttgatgaacacccgcgtctgaacattatcctgggtcatatgggcgaaggtctgccgtacatgatgtaccgtatcgatcatcgtatcgcatgggttaaagctccgccggattatccggcaaaacgtcgctttatggactacttcctcgaaaattttcacattaccacgtcaggcaacttccgtacccagacgctgattgatgcaatcctggaaattggtgctgatcgcatcctgttctcgaccgactggccgtttgaaaacattgatcatgccgctgactggtttaatgctacgtctattgccgaagctgaccgtgtcaaaatcggccgcaccaatgcccgtcgtctgttcaaactggatggccgt

SEQ ID NO: 989 - DNA, 984 bp, Artificial Sequence
  synthetic construct; Dicamba decarboxylase variant
atggctcaaggcaaagtggcactggaagaacatttcgcaatcccggaaacgctgcaggacgccgcaggtttcgtcccgggcgactactggaaagaactgcagcatcgtctgctggatatccaagacactcgcctgaaagagatggataaacacgagatcggaacgatggttctgtccctggctgcaccggctgttcaggcgattccggaccgtcgcaaagccattgaacttgcacgtcgcgctaatgatttcctggcagaagaagttgctaaacgtccggaccgctttctggcattcgcagcactgccgatgcaggatccagacgcagctaccgaagaactgcaacgttgtgtcgccgatctgggcttcgtgggtgcgatggttaatggcttcagccaggaaggcgatggtcaaaccccgctgtattacgacctgccgcagtatcgcccgttctggaaagaagtcgaaaaactggatgtgccgttttatctgcatccgcgtaacccgctgccgcaggatgcccgtatctacgacggtcacccgtggctgctgggtccgacctgggcgttcgcccaagaaacggcggtgcatgccctgcgtctgatggcatctggcctgtttgatgaacacccgcgtctgaacattatcctgggtcatatgggcgaaggtctgccgtacatgatgtaccgtatcgatcatcgtatcgcatgggttaaagctccgccggattatccggcaaaacgtcgctttatggactacttcctcgaaaatttttggattaccacgtcaggcaacttccgtacccagacgctgattgatgcaatcctggaaattggtgctgatcgcatcctgttctcgaccgactggccgtttgaaaacattgatcatgccgctgactggtttaatgctacgtctattgccgaagctgaccgtgtcaaaatcggccgcaccaatgcccgtcgtctgttcaaactggatggacgt

SEQ ID NO: 990 - DNA, 984 bp, Artificial Sequence
  synthetic construct; Dicamba decarboxylase variant
atggctcaaggcaaagtggcactggaagaacatttcgcaatcccggaaacgctgcaagacgccgcaggtttcgtcccgggcgactactggaaagaactgcagcatcgtctgttggatatccaagacgagcgcctgaaagagatggataaacacgagatcggaacgatggttctgtccctggctgcaccggctgttcaggcgattccggaccgccgcaaagccattgaacttgcaaaacgcgctaatgatttcctggcagaagaagttgctaaacgtccggaccgctttctggcattcgcagcactgccgctgcaggatgtggacgcagctaccgaggaactgcaacgttgtgtcaacgatctgggcttcgtgggtgcgatggttaatggcttcagccaggaaggcgatggtcaaaccccgctgtattacgacctgccgcagtatcgcccgttctggggtgaagtcgaaaaactggatgtgccgttttatctgcatccgcgtaacccgctgccgcaggattcccgtatctacgacggtcacccgtggctgctgggtccgacctgggcgttcgcccaagaaacggcggtgcatgccctgcgtctgatggcatctggcctgtttgatgaacacccgcgtctgaacattatcctgggtcatatgggcgaaggtctgccgtacatgatgtaccgtatcgatcatcgtatcgcatgggttaaagctccgccggattatccggcaaaacgtcgctttatggactacttcctcgaaaattttcacattaccacgtcaggcaacttccgtacccagacgctgattgatgcaatcctggaaattggtgctgatcgcatcctgttctcgaccgactggccgtttgaaaacattgatcatgccgctgactggtttgcggctacgtctattgccgaagctgaccgtgtcaaaatcggccgcaccaatgcccgtcgtctgttcaaactggatggccgt

SEQ ID NO: 991 - DNA, 984 bp, Artificial Sequence
  synthetic construct; Dicamba decarboxylase variant
atggctcaaggcaaagtggcactggaagaacatttcgcaatcccggaaacgctgcaagacgccgcaggtttcgtcccgggcgactactggaaagaactgcagcatcgtctgctggatatccaagacactcgcctgaaagagatggataaacacgagatcggaacgatggttctgtccctggctgcaccggctgttcaggcgattccggaccgtcgcaaagccattgaacttgcacgtcgcgctaatgatttcctggcagaagaagttgctaaacgtccggaccgctttctggcattcgcagcactgccgctgcaggatgtggacgcagctaccgaagaactgcaacgttgtgtcaacgatctgggcttcgtgggtgcgatggttaatggcttcagccaggaaggcgatggtcaaaccccgctgtattacgacctgccgcagtatcgcccgttctggggtgaagtcgaaaaactggatgtgccgttttatctgcatccgcgtaacccgctgccgcaggatgcccgtatctacgacggtcacccgtggctgctgggtccgacctgggcgttcgcccaagaaacggcggtgcatgccctgcgtctgatggcatctggcctgtttgatgaacacccgcgtctgaacattatcctgggtcatatgggcgaaggtctgccgtacatgatgtaccgtatcgatcatcgtatcgcatgggttaaagctccgccggattatccggcaaaacgtcgctttatggactacttcctcgaaaatttttggattaccacgtcaggcaacttccgtacccagacgctgattgatgcaatcctggaaattggtgctgatcgcatcctgttctcgaccgactggccgtttgaaaacattgatcatgccgctgactggtttaatgctacgtctattgccgaagctgaccgtgtcaaaatcggccgcaccaatgcccgtaatctgttcaaactggatgtacgt

SEQ ID NO: 992 - DNA, 984 bp, Artificial Sequence
  synthetic construct; Dicamba decarboxylase variant
atggctcaaggcaaagtggcactggaagaacatttcgcaatcccggaaacgctgcaagacgccgcaggtttcgtcccgggcgactactggaaagaactgcagcatcgtctgatggatatccaagacacgcgcctgaaagagatggataaacacgagatcggaacgatggttctgtccctggctgcaccggctgttcaggcgattccggaccgtcgcaaagccattgaaattgcacgtcgcgctaatgatttcctggcagaagaagttgctaaacgtccggaccgctttctggcattcgcagcactgccgatgcaggatccagaagcagctacctccgaactgcaacgttgtgtcgccgatctgggcttcgtgggtgcgatggttaatggcttcagccaggaaggcgatggtcaaaccccgctgtattacgacctgccgcagtatcgcccgttctggggtgaagtcgaaaaactggatgtgccgttttatctgcatccgcgtaacccgctgccgcaggatgcccgtatctacgacggtcacccgtggctgctgggtccgacctgggcgttcgcccaagaaacggcggtgcatgccctgcgtctgatggcatctggcctgtttgatgaacacccgcgtctgaacattatcctgggtcatatgggcgaaggtctgccgtacatgatgtaccgtatcgatcatcgtatcgcatgggttaaagctccgccggattatccggcaaaacgtcgctttatggactacttcctcgaaaattttcacattaccacgtcaggcaacttccgtacccagacgctgattgatgcaatcctggaaattggtgctgatcgcatcctgttctcgaccgactggccgtttgaaaacattgatcatgccgctgactggtttaatgctacgtctattgccgaagctgaccgtgtcaaaatcggccgcaccaatgcccgtcgtctgttcaaactggatggccgt

SEQ ID NO: 993 - DNA, 984 bp, Artificial Sequence
  synthetic construct; Dicamba decarboxylase variant
atggctcaaggcctggtggcactggaagaacatttcgcaatcccggaaacgctgcaagacgccgcaggtttcgtcccgggcgactactggaaagaactgcagcatcgtctgttggatatgcaagacgagcgcctgaaagagatggataaacacgagatcggaacgatggttctgtccctggctgcaccggctgttcaggcgattccggaccgtcgccaagccattgaacttgcacgtcgcgctaatgatttcctggcagaagaagttgctaaacgtccggaccgctttctggcattcgcagcactgccgctgcaggatgtggacgcagctaccgaagaactgcaacgttgtgtcaacgatctgggcttcgtgggtgcgatggttaatggcttcagccaggaaggcgatggtcaaaccccgctgtattacgacctgccgcagtatcgcccgttctggaaagaagtcgaaaaactggatgtgccgttttatctgcatccgcgtaacccgctgccgcaggattcccgtatctacgacggtcacccgtggctgctgggtccgacctgggcgttcgcccaagaaacggcggtgcatgccctgcgtctgatggcatctggcctgtttgatgaacacccgcgtctgaacattatcctgggtcatatgggcgaaggtctgccgtacatgatgtaccgtatcgatcatcgtatcgcatgggttaaagctccgccggattatccggcaaaacgtcgctttatggactacttcctcgaaaattttcacattaccacgtcaggcaacttccgtacccagacgctgattgatgcaatcctggaaattggtgctgatcgcatcctgttctcgaccgactggccgtttgaaaacattgatcatgccgctgactggtttaatgctacgtctattgccgaagctgaccgtgtcaaaatcggccgcaccaatgcccgtcgtctgttcaaactggatggccgt

SEQ ID NO: 994 - DNA, 984 bp, Artificial Sequence
  synthetic construct; Dicamba decarboxylase variant
atggctcaaggcctggtggcactggaagaacatttcgcaatcccggaaacgctgaatgacgccgcaggtttcgtcccgggcgactactggaaagaactgcagcatcgtctgctggatatccaagacactcgcctgaaagagatggataaacacgagatcggaacgatgattctgtccctggctgcaccggctgttcagggtattgtcgaccgtcgcaaagccattgaacttgcaaaacgcgctaatgatttcctggcagaagaagttgctaaacgtccggaccgctttctggcattcgcagcactgccgctgcaggatgtggacgcagctaccgaagaactgcaacgttgtgtcaacgatctgggcttcgtgggtgcgatggttaatggcttcagccaggaaggcgatggtcaaaccccgctgtattacgacctgccgcagtatcgcccgttctggggtgaagtcgaaaaactggatgtgccgttttatctgcatccgcgtaacccgctgccgcaggatgcccgtatctacgacggtcacccgtggctgctgggtccgacctgggcgttcgcccaagaaacggcggtgcatgccctgcgtctgatggcatctggcctgtttgatgaacacccgcgtctgaacattatcctgggtcatatgggcgaaggtctgccgtacatgatgtaccgtatcgatcatcgtatcgcatgggttcatgctccgccgcgttatccggcaaaacgtcgctttatggactacttcctcgaaaattttcacattaccacgtcaggcaacttccgtacccagacgctgattgatgcaatcctggaaattggtgctgatcgcatcctgttctcgaccgactggccgtttgaaaacattgatcatgccgctgactggtttaatgctacgtctattgccgaagctgaccgtgtcaaaatcggccgcaccaatgcccgtcgtctgttcaaactggatgtaagt

SEQ ID NO: 995 - DNA, 984 bp, Artificial Sequence
  synthetic construct; Dicamba decarboxylase variant
atggctcaaggcaaagtggcactggaagaacatttcgcaatcccggaaacgctgaatgacgccgcaggtttcgtcccgggcgactactggaaagaactgcagcatcgtctgctggatatccaagacactcgcctgaaagagatggatcgtcacgggatcggaacgatgattctgtccctggctgcaccggctgttcaggcgattccggaccgtcgcaaagccattgaaattgcacgtcgcgctaatgatttcctggcagaagaagttgctaaacgtccggaccgctttctggcattcgcagcactgccgctgcaggatgtggacgcagctaccgaagaactgcaacgttgtgtcaacgatctgggcttcgtgggtgcgatggttaatggcttcagccaggaaggcgatggtcaaaccccgctgtattacgacctgccgcagtatcgcccgttctggggtgaagtcgaaaaactggatgtgccgttttatctgcatccgcgtaacccgctgccgcaggattcccgtatctacgacggtcacccgtggctgctgggtccgacctgggcgttcgcccaagaaacggcggtgcatgccctgcgtctgatggcatctggcctgtttgatgaacacccgcgtctgaacattatcctgggtcatatgggcgaaggtctgccgtacatgatgtaccgtatcgatcatcgtatcgcatgggttaaagctccgccggattatccggcaaaacgtcgctttatggactacttcctcgaaaattttcacattaccacgtcaggcaacttccgtacccagacgctgattgatgcaatcctggaaattggtgctgatcgcatcctgttctcgaccgactggccgtttgaaaacattgatcatgccgctgactggtttaatgctacgtctattgccgaagctgaccgtgtcaaaatcggccgcaccaatgcccgtcgtctgttcaaactggatggacgt

SEQ ID NO: 996 - DNA, 984 bp, Artificial Sequence
  synthetic construct; Dicamba decarboxylase variant
atggctcaaggcaaagtggcactggaagaacatttcgcaatcccggaaacgctgcaagacgccgcaggtttcgtcccgggcgactactggaaagaactgcagcatcgtctgttggatatccaagacactcgcctgaaagagatggatcgtcacgggatcggaacgatggttctgtccctggctgcaccggctgttcaggcgattccggaccgtcgcaaagccattgaaattgcacgtcgcgctaatgatttcctggcagaagaagttgctaaacgtccggaccgctttctggcattcgcagcactgccgctgcaggatgtggacgcagctaccgaagaactgcaacgttgtgtcgccgatctgggcttcgtgggtgcgatggttaatggcttcagccaggaaggcgatggtcaaaccccgctgtattacgacctgccgcagtatcgcccgttctggaaagaagtcgaaaaactggatgtgccgttttatctgcatccgcgtaacccgctgccgcaggattcccgtatctacgacggtcacccgtggctgctgggtccgacctgggcgttcgcccaagaaacggcggtgcatgccctgcgtctgatggcatctggcctgtttgatgaacacccgcgtctgaacattatcctgggtcatatgggcgaaggtctgccgtacatgatgtaccgtatcgatcatcgtatcgcatgggttaaagctccgccggattatccggcaaaacgtcgctttatggactacttcctcgaaaattttcacattaccacgtcaggcaacttccgtacccagacgctgattgatgcaatcctggaaattggtgctgatcgcatcctgttctcgaccgactggccgtttgaaaacattgatcatgccgctgactggtttgcggctacgtctattgccgaagctgaccgtgtcaaaatcggccgcaccaatgcccgtcgtctgttcaaactggatggccgt

SEQ ID NO: 997 - DNA, 984 bp, Artificial Sequence
  synthetic construct; Dicamba decarboxylase variant
atggctcaaggcctggtggcactggaagaacatttcgcaatcccggaaacgctgcaagacgccgcaggtttcgtcccgggcgactactggaaagaactgcagcatcgtctgctggatatccaagacactcgcctgaaagagatggataaacacgggatcggaacgatggttctgtccctggctgcaccggctgttcaggcgattccggaccgtcgcaaagccattgaaatcgcacgtcgcgctaatgatttcctggcagaagaagttgctaaacgtccggaccgctttctggcattcgcagcactgccgctgcaggatgtggacgcagctaccgaagaactgcaacgttgtgtcaacgatctgggcttcgtgggtgcgatggttaatggcttcagccaggaaggcgatggtcaaaccccgctgtattacgacctgccgcagtatcgcccgttctggggtgaagtcgaaaaactggatgtgccgttttatctgcatccgcgtaacccgctgccgcaggatgcccgtatctacgacggtcacccgtggctgctgggtccgacctgggcgttcgcccaagaaacggcggtgcatgccctgcgtctgatggcatctggcctgtttgatgaacacccgcgtctgaacattatcctgggtcatctgggcgaaggtctgccgtacatgatgtaccgtatcgatcatcgtatcgcatgggttaaagctccgccggattatccggcaaaacgtcgctttatggactacttcctcgaaaatttttggattaccacgtcaggcaacttccgtacccagacgctgattgatgcaatcctggaaattggtgctgatcgcatcctgttctcgaccgactggccgtttgaaaacattgatcatgccgctgactggtttaatgctacgtctattgccgaagctgaccgtgtcaaaatcggccgcaccaatgcccgtcgtctgttcaaactggatgtacgt

SEQ ID NO: 998 - DNA, 984 bp, Artificial Sequence
  synthetic construct; Dicamba decarboxylase variant
atggctcaaggcaaagtggcactggaagaacatttcgcaatcccggaaacgctgcaagacgccgcaggtttcgtcccgggcgactactggaaagaactgcagcatcgtctgctggatatccaagacactcgcctgaaagagatggataaacacgagatcggaacgatggttctgtccctggctgcaccggctgttcaggcgattccggaccgtcgcaaagccattgaacttgcacgtcgcgctaatgatttcctggcagaagaagttgctaaacgtccggaccgctttctggcattcgcagcactgccgctgcaggatgtggacgcagctacctccgaactgcaacgttgtgtcaacgatctgggcttcgtgggtgcgatggttaatggcttcagccaggaaggcgatggtcaaaccccgctgtattacgacctgccgcagtatcgcccgttctggggtgaagtcgaaaaactggatgtgccgttttatctgcatccgcgtaacccgctgccgcaggattcccgtatctacgacggtcacccgtggctgctgggtccgacctgggcgttcgcccaagaaacggcggtgcatgccctgcgtctgatggcatctggcctgtttgatgaacacccgcgtctgaacattatcctgggtcatctgggcgaaggtctgccgtacatgatgtaccgtatcgatcatcgtatcgcatgggttaaagctccgccggattatccggcaaaacgtcgctttatggactacttcctcgaaaatttttggattaccacgtcaggcaacttccgtacccagacgctgattgatgcaatcctggaaattggtgctgatcgcatcctgttctcgaccgactggccgtttgaaaacattgatcatgccgctgactggtttaatgctacgtctattgccgaagctgaccgtgtcaaaatcggccgcaccaatgcccgtaatctgttcaaactggatgtaagt

SEQ ID NO: 999 - DNA, 984 bp, Artificial Sequence
  synthetic construct; Dicamba decarboxylase variant
atggctcaaggcctggtggcactggaagaacatttcgcaatcccggaaacgctgcaagacgccgcaggtttcgtcccgggcgactactggaaagaactgcagcatcgtctgctggatatgcaagacacgcgcctgaaagagatggatcgtcacgggatcggaacgatggttctgtccctggctgcaccggctgttcaggcgattccggaccgtcgcaaagccattgaacttgcacgtcgcgctaatgatttcctggcagaagaagttgctaaacgtccggaccgctttctggcattcgcagcactgccgctgcaggatgtggacgcagctaccgaagaactgcaacgttgtgtcaacgatctgggcttcgtgggtgcgatggttaatggcttcagccaggaaggcgatggtcaaaccccgctgtattacgacctgccgcagtatcgcccgttctggggtgaagtcgaaaaactggatgtgccgttttatctgcatccgcgtaacccgctgccgcaggatgcccgtatctacgacggtcacccgtggctgctgggtccgacctgggcgttcgcccaagaaacggcggtgcatgccctgcgtctgatggcatctggcctgtttgatgaacacccgcgtctgaacattatcctgggtcatatgggcgaaggtctgccgtacatgatgtaccgtatcgatcatcgtatcgcatgggttaaagctccgccggattatccggcaaaacgtcgctttatggactacttcctcgaaaattttcacattaccacgtcaggcaacttccgtacccagacgctgattgatgcaatcctggaaattggtgctgatcgcatcctgttctcgaccgactggccgtttgaaaacattgatcatgccgctgactggtttaatgctacgtctattgccgaagctgaccgtgtcaaaatcggccgcaccaatgcccgtcgtctgttcaaactggatggccgt

SEQ ID NO: 1000 - DNA, 984 bp, Artificial Sequence
  synthetic construct; Dicamba decarboxylase variant
atggctcaaggcaaagtggcactggaagaacatttcgcaatcccggaaacgctgcaggacgccgcaggtttcgtcccgggcgactactggaaagaactgcagcatcgtctgttggatatgcaagacactcgcctgaaagagatggataaacacgggatcggaacgatggttctgtccctggctgcaccggctgttcaggctattgtcgaccgtcgcaaagccattgaacttgcacgtcgcgctaatgatttcctggcagaagaagttgctaaacgtccggaccgctttctggcattcgcagcactgccgctgcaggatgtggacgcagctaccgaagaactgcaacgttgtgtcaacgatctgggcttcgtgggtgcgatggttaatggcttcagccaggaaggcgatggtcaaaccccgctgtattacgacctgccgcagtatcgcccgttctggggtgaagtcgaaaaactggatgtgccgttttatctgcatccgcgtaacccgctgccgcaggattcccgtatctacgacggtcacccgtggctgctgggtccgacctgggcgttcgcccaagaaacggcggtgcatgccctgcgtctgatggcatctggcctgtttgatgaacacccgcgtctgaacattatcctgggtcatatgggcgaaggtctgccgtacatgatgtaccgtatcgatcatcgtatcgcatgggttaaagctccgccggattatccggcaaaacgtcgctttatggactacttcctcgaaaattttcacattaccacgtcaggcaacttccgtacccagacgctgattgatgcaatcctggaaattggtgctgatcgcatcctgttctcgaccgactggccgtttgaaaacattgatcatgccgctgactggtttgcggctacgtctattgccgaagctgaccgtgtcaaaatcggccgcaccaatgcccgtcgtctgttcaaactggatggacgt

SEQ ID NO: 1001 - DNA, 984 bp, Artificial Sequence
  synthetic construct; Dicamba decarboxylase variant
atggctcaaggcctggtggcactggaagaacatttcgcaatcccggaaacgctgcaagacgccgcaggtttcgtcccgggcgactactggaaagaactgcagcatcgtctgttggatatccaagacacgcgcctgaaagagatggataaacacgagatcggaacgatgattctgtccctggctgcaccggctgttcaggcgattccggaccgtcgcaaagccattgaacttgcaaaacgcgctaatgatttcctggcagaagaagttgctaaacgtccggaccgctttctggcattcgcagcactgccgatgcaggatgtggacgcagctaccgaggaactgcaacgttgtgtcgccgatctgggcttcgtgggtgcgatggttaatggcttcagccaggaaggcgatggtcaaaccccgctgtattacgacctgccgcagtatcgcccgttctggaaagaagtcgaaaaactggatgtgccgttttatctgcatccgcgtaacccgctgccgcaggatgcccgtatctacgacggtcacccgtggctgctgggtccgacctgggcgttcgcccaagaaacggcggtgcatgccctgcgtctgatggcatctggcctgtttgatgaacacccgcgtctgaacattatcctgggtcatatgggcgaaggtctgccgtacatgatgtaccgtatcgatcatcgtatcgcatgggttaaagctccgccgcgttatccggcaaaacgtcgctttatggactacttcctcgaaaattttcacattaccacgtcaggcaacttccgtacccagacgctgattgatgcaatcctggaaattggtgctgatcgcatcctgttctcgaccgactggccgtttgaaaacattgatcatgccgctgactggtttaatgctacgtctattgccgaagctgaccgtgtcaaaatcggccgcaccaatgcccgtcgtctgttcaaactggatgtacgt

SEQ ID NO: 1002 - DNA, 984 bp, Artificial Sequence
  synthetic construct; Dicamba decarboxylase variant
atggctcaaggcaaagtggcactggaagaacatttcgcaatcccggaaacgctgcaggacgccgcaggtttcgtcccgggcgactactggaaagaactgcagcatcgtctgatggatatccaagacactcgcctgaaagagatggatcgtcacgggatcggaacgatggttctgtccctggctgcaccggctgttcaggcgattccggaccgtcgcaaagccattgaaatcgcacgtcgcgctaatgatttcctggcagaagaagttgctaaacgtccggaccgctttctggcattcgcagcactgccgatgcaggatccagaagcagctacctccgaactgcaacgttgtgtcgccgatctgggcttcgtgggtgcgatggttaatggcttcagccaggaaggcgatggtcaaaccccgctgtattacgacctgccgcagtatcgcccgttctggggtgaagtcgaaaaactggatgtgccgttttatctgcatccgcgtaacccgctgccgcaggatgcccgtatctacgacggtcacccgtggctgctgggtccgacctgggcgttcgcccaagaaacggcggtgcatgccctgcgtctgatggcatctggcctgtttgatgaacacccgcgtctgaacattatcctgggtcatatgggcgaaggtctgccgtacatgatgtaccgtatcgatcatcgtatcgcatgggttaaagctccgccggattatccggcaaaacgtcgctttatggactacttcctcgaaaattttcacattaccacgtcaggcaacttccgtacccagacgctgattgatgcaatcctggaaattggtgctgatcgcatcctgttctcgaccgactggccgtttgaaaacattgatcatgccgctgactggtttaatgctacgtctattgccgaagctgaccgtgtcaaaatcggccgcaccaatgcccgtaatctgttcaaactggatgtacgt

SEQ ID NO: 1003 - DNA, 984 bp, Artificial Sequence
  synthetic construct; Dicamba decarboxylase variant
atggctcaaggcctggtggcactggaagaacatttcgcaatcccggaaacgctgcaagacgccgcaggtttcgtcccgggctgctactggaaagaactgcagcatcgtctgctggatatccaagacactcgcctgaaagagatggatcgtcacgagatcggaacgatggttctgtccctggctgcaccggctgttcaggcgattccggaccgtcgcaaagccattgaacttgcaaaacgcgctaatgatttcctggcagaagaagttgctaaacgtccggaccgctttctggcattcgcagcactgccgttgcaggatgtggacgcagctaccgaagaactgcaacgttgtgtcaacgatctgggcttcgtgggtgcgatggttaatggcttcagccaggaaggcgatggtcaaaccccgctgtattacgacctgccgcagtatcgcccgttctggggtgaagtcgaaaaactggatgtgccgttttatctgcatccgcgtaacccgctgccgcaggatgcccgtatctacgacggtcacccgtggctgctgggtccgacctgggcgttcgcccaagaaacggcggtgcatgccctgcgtctgatggcatctggcctgtttgatgaacacccgcgtctgaacattatcctgggtcatatgggcgaaggtctgccgtacatgatgtaccgtatcgatcatcgtatcgcatgggttaaagctccgccggattatccggcaaaacgtcgctttatggactacttcctcgaaaattttcacattaccacgtcaggcaacttccgtacccagacgctgattgatgcaatcctggaaattggtgctgatcgcatcctgttctcgaccgactggccgtttgaaaacattgatcatgccgctgactggtttgcggctacgtctattgccgaagctgaccgtgtcaaaatcggccgcaccaatgcccgtcgtctgttcaaactggatggaagt

SEQ ID NO: 1004 - DNA, 984 bp, Artificial Sequence
  synthetic construct; Dicamba decarboxylase variant
atggctcaaggcaaagtggcactggaagaacatttcgcaatcccggaaacgctgcaagacgccgcaggtttcgtcccgggctgctactggaaagaactgcagcatcgtctgctggatatccaagacactcgcctgaaagagatggataaacacgagatcggaacgatggttctgtccctggctgcaccggctgttcaggcgattccggaccgtcgcaaagccattgaacttgcacgtcgcgctaatgatttcctggcagaagaagttgctaaacgtccggaccgctttctggcattcgcagcactgccgctgcaggatgtggacgcagctaccgaagaactgcaacgttgtgtcaacgatctgggcttcgtgggtgcgatggttaatggcttcagccaggaaggcgatggtcaaaccccgctgtattacgacctgccgcagtatcgcccgttctggggtgaagtcgaaaaactggatgtgccgttttatctgcatccgcgtaacccgctgccgcaggattcccgtatctacgacggtcacccgtggctgctgggtccgacctgggcgttcgcccaagaaacggcggtgcatgccctgcgtctgatggcatctggcctgtttgatgaacacccgcgtctgaacattatcctgggtcatatgggcgaaggtctgccgtacatgatgtaccgtatcgatcatcgtatcgcatgggttaaagctccgccgcgttatccggcaaaacgtcgctttatggactacttcctcgaaaattttcacattaccacgtcaggcaacttccgtacccagacgctgattgatgcaatcctggaaattggtgctgatcgcatcctgttctcgaccgactggccgtttgaaaacattgatcatgccgctgactggtttgcggctacgtctattgccgaagctgaccgtgtcaaaatcggccgcaccaatgcccgtcgtctgttcaaactggatgtacgt

SEQ ID NO: 1005 - DNA, 984 bp, Artificial Sequence
  synthetic construct; Dicamba decarboxylase variant
atggctcaaggcaaagtggcactggaagaacatttcgcaatcccggaaacgctgcaagacgccgcaggtttcgtcccgggcgactactggaaagaactgcagcatcgtctgttggatatgcaagacgagcgcctgaaagagatggataaacacgagatcggaacgatggttctgtccctggctgcaccggctgttcaggcgattccggaccgtcgcaaagccattgaacttgcacgtcgcgctaatgatttcctggcagaagaagttgctaaacgtccggaccgctttctggcattcgcagcactgccgttgcaggatgtggacgcagctaccgaagaactgcaacgttgtgtcaacgatctgggcttcgtgggtgcgatggttaatggcttcagccaggaaggcgatggtcaaaccccgctgtattacgacctgccgcagtatcgcccgttctggggtgaagtcgaaaaactggatgtgccgttttatctgcatccgcgtaacccgctgccgcaggattcccgtatctacgacggtcacccgtggctgctgggtccgacctgggcgttcgcccaagaaacggcggtgcatgccctgcgtctgatggcatctggcctgtttgatgaacacccgcgtctgaacattatcctgggtcatatgggcgaaggtctgccgtacatgatgtaccgtatcgatcatcgtatcgcatgggttaaagctccgccggattatccggcaaaacgtcgctttatggactacttcctcgaaaattttcacattaccacgtcaggcaacttccgtacccagacgctgattgatgcaatcctggaaattggtgctgatcgcatcctgttctcgaccgactggccgtttgaaaacattgatcatgccgctgactggtttaatgctacgtctattgccgaagctgaccgtgtcaaaatcggccgcaccaatgcccgtcgtctgttcaaactggatggccgt

SEQ ID NO: 1006 - DNA, 984 bp, Artificial Sequence
  synthetic construct; Dicamba decarboxylase variant
atggctcaaggcctggtggcactggaagaacatttcgcaatcccggaaacgctgcaagacgccgcaggtttcgtcccgggcgactactggaaagaactgcagcatcgtctgctggatatccaagacactcgcctgaaagagatggataaacacgggatcggaacgatgattctgtccctggctgcaccggctgttcaggcgattccggaccgtcgcaaagccattgaacttgcacgtcgcgctaatgatttcctggcagaagaagttgctaaacgtccggaccgctttctggcattcgcagcactgccgctgcaggatgtggacgcagctaccgaagagctgcaacgttgtgtcgccgatctgggcttcgtgggtgcgatggttaatggcttcagccaggaaggcgatggtcaaaccccgctgtattacgacctgccgcagtatcgcccgttctggaaagaagtcgaaaaactggatgtgccgttttatctgcatccgcgtaacccgctgccgcaggattcccgtatctacgacggtcacccgtggctgctgggtccgacctgggcgttcgcccaagaaacggcggtgcatgccctgcgtctgatggcatctggcctgtttgatgaacacccgcgtctgaacattatcctgggtcatatgggcgaaggtctgccgtacatgatgtaccgtatcgatcatcgtatcgcatgggttaaagctccgccggattatccggcaaaacgtcgctttatggactacttcctcgaaaattttcacattaccacgtcaggcaacttccgtacccagacgctgattgatgcaatcctggaaattggtgctgatcgcatcctgttctcgaccgactggccgtttgaaaacattgatcatgccgctgactggtttaatgctacgtctattgccgaagctgaccgtgtcaaaatcggccgcaccaatgcccgtaatctgttcaaactggatggacgt

SEQ ID NO: 1007 - DNA, 984 bp, Artificial Sequence
  synthetic construct; Dicamba decarboxylase variant
atggctcaaggcctggtggcactggaagaacatttcgcaatcccggaaacgctgcaggacgccgcaggtttcgtcccgggctgctactggaaagaactgcagcatcgtctgctggatatccaagacactcgcctgaaagagatggataaacacgagatcggaacgatggttctgtccctggctgcaccggctgttcaggcgattccggaccgtcgcaaagccattgaaattgcacgtcgcgctaatgatttcctggcagaagaagttgctaaacgtccggaccgctttctggcattcgcagcactgccgctgcaggatgtggacgcagctaccgaagaactgcaacgttgtgtcgccgatctgggcttcgtgggtgcgatggttaatggcttcagccaggaaggcgatggtcaaaccccgctgtattacgacctgccgcagtatcgcccgttctggggtgaagtcgaaaaactggatgtgccgttttatctgcatccgcgtaacccgctgccgcaggattcccgtatctacgacggtcacccgtggctgctgggtccgacctgggcgttcgcccaagaaacggcggtgcatgccctgcgtctgatggcgtctggcctgtttgatgaacacccgcgtctgaacattatcctgggtcatatgggcgaaggtctgccgtacatgatgtaccgtatcgatcatcgtatcgcatgggttaaagctccgccggattatccggcaaaacgtcgctttatggactacttcctcgaaaatttttggattaccacgtcaggcaacttccgtacccagacgctgattgatgcaatcctggaaattggtgctgatcgcatcctgttctcgaccgactggccgtttgaaaacattgatcatgccgctgactggtttaatgctacgtctattgccgaagctgaccgtgtcaaaatcggccgcaccaatgcccgtcgtctgttcaaactggatgtacgt

SEQ ID NO: 1008 - DNA, 984 bp, Artificial Sequence
  synthetic construct; Dicamba decarboxylase variant
atggctcaaggcctggtggcactggaagaacatttcgcaatcccggaaacgctgcaagacgccgcaggtttcgtcccgggcgactactggaaagaactgcagcatcgtctgatggatatccaagacactcgcctgaaagagatggataaacacgggatcggaacgatggttctgtccctggctgcaccggctgttcagggtattgtcgaccgtcgcaaagccattgaaattgcaaaacgcgctaatgatttcctggcagaagaagttgctaaacgtccggaccgctttctggcattcgcagcactgccgctgcaggatgtggacgcagctaccgaggaactgcaacgttgtgtcgccgatctgggcttcgtgggtgcgatggttaatggcttcagccaggaaggcgatggtcaaaccccgctgtattacgacctgccgcagtatcgcccgttctggggtgaagtcgaaaaactggatgtgccgttttatctgcatccgcgtaacccgctgccgcaggatgcccgtatctacgacggtcacccgtggctgctgggtccgacctgggcgttcgcccaagaaacggcggtgcatgccctgcgtctgatggcatctggcctgtttgatgaacacccgcgtctgaacattatcctgggtcatctgggcgaaggtctgccgtacatgatgtaccgtatcgatcatcgtatcgcatgggttaaagctccgccggattatccggcaaaacgtcgctttatggactacttcctcgaaaatttttggattaccacgtcaggcaacttccgtacccagacgctgattgatgcaatcctggaaattggtgctgatcgcatcctgttctcgaccgactggccgtttgaaaacattgatcatgccgctgactggtttgcggctacgtctattgccgaagctgaccgtgtcaaaatcggccgcaccaatgcccgtcgtctgttcaaactggatgtaagt

SEQ ID NO: 1009 - DNA, 984 bp, Artificial Sequence
  synthetic construct; Dicamba decarboxylase variant
atggctcaaggcaaagtggcactggaagaacatttcgcaatcccggaaacgctgcaagacgccgcaggtttcgtcccgggctgctactggaaagaactgcagcatcgtctgatggatatccaagacacgcgcctgaaagagatggataaacacgagatcggaacgatggttctgtccctggctgcaccggctgttcaggcgattccggaccgtcgcaaagccattgaaatcgcacgtcgcgctaatgatttcctggcagaagaagttgctaaacgtccggaccgctttctggcattcgcagcactgccgctgcaggatgtggacgcagctaccgaggaactgcaacgttgtgtcaacgatctgggcttcgtgggtgcgatggttaatggcttcagccaggaaggcgatggtcaaaccccgctgtattacgacctgccgcagtatcgcccgttctggggtgaagtcgaaaaactggatgtgccgttttatctgcatccgcgtaacccgctgccgcaggatgcccgtatctacgacggtcacccgtggctgctgggtccgacctgggcgttcgcccaagaaacggcggtgcatgccctgcgtctgatggcatctggcctgtttgatgaacacccgcgtctgaacattatcctgggtcatatgggcgaaggtctgccgtacatgatgtaccgtatcgatcatcgtatcgcatgggttaaagctccgccggattatccggcaaaacgtcgctttatggactacttcctcgaaaattttcacattaccacgtcaggcaacttccgtacccagacgctgattgatgcaatcctggaaattggtgctgatcgcatcctgttctcgaccgactggccgtttgaaaacattggtcatgccgctgactggtttaatgctacgtctattgccgaagctgaccgtgtcaaaatcggccgcaccaatgcccgtcgtctgttcaaactggatgtaagt

SEQ ID NO: 1010 - DNA, 984 bp, Artificial Sequence
  synthetic construct; Dicamba decarboxylase variant
atggctcaaggcctggtggcactggaagaacatttcgcaatcccggaaacgctgaatgacgccgcaggtttcgtcccgggctgctactggaaagaactgcagcatcgtctgttggatatccaagacactcgcctgaaagagatggataaacacgggatcggaacgatgattctgtccctggctgcaccggctgttcaggcgattccggaccgtcgcaaagccattgaacttgcacgtcgcgctaatgatttcctggcagaagaagttgctaaacgtccggaccgctttctggcattcgcagcactgccgatgcaggatccagacgcagctaccgaagaactgcaacgttgtgtcgccgatctgggcttcgtgggtgcgatggttaatggcttcagccaggaaggcgatggtcaaaccccgctgtattacgacctgccgcagtatcgcccgttctggaaagaagtcgaaaaactggatgtgccgttttatctgcatccgcgtaacccgctgccgcaggatgcccgtatctacgacggtcacccgtggctgctgggtccgacctgggcgttcgcccaagaaacggcggtgcatgccctgcgtctgatggcatctggcctgtttgatgaacacccgcgtctgaacattatcctgggtcatatgggcgaaggtctgccgtacatgatgtaccgtatcgaccatcgtatcgcatgggttaaagctccgccggattatccggcaaaacgtcgctttatggactacttcctcgaaaattttcacattaccacgtcaggcaacttccgtacccagacgctgattgatgcaatcctggaaattggtgctgatcgcatcctgttctcgaccgactggccgtttgaaaacattgatcatgccgctgactggtttgcggctacgtctattgccgaagctgaccgtgtcaaaatcggccgcaccaatgcccgtcgtctgttcaaactggatgtacgt

SEQ ID NO: 1011 - DNA, 984 bp, Artificial Sequence
  synthetic construct; Dicamba decarboxylase variant
atggctcaaggcctggtggcactggaagaacatttcgcaatcccggaaacgctgcaagacgccgcaggtttcgtcccgggcgactactggaaagaactgcagcatcgtctgttggatatgcaagacactcgcctgaaagagatggataaacacgagatcggaacgatgattctgtccctggctgcaccggctgttcaggcgattccggaccgtcgcaaagccattgaacttgcacgtcgcgctaatgatttcctggcagaagaagttgctaaacgtccggaccgctttctggcattcgcagcactgccgctgcaggatgtggacgcagctaccgaagaactgcaacgttgtgtcgccgatctgggcttcgtgggtgcgatggttaatggcttcagccaggaaggcgatggtcaaaccccgctgtattacgacctgccgcagtatcgcccgttctggggtgaagtcgaaaaactggatgtgccgttttatctgcatccgcgtaacccgctgccgcaggatgcccgtatctacgacggtcacccgtggctgctgggtccgacctgggcgttcgcccaagaaacggcggtgcatgccctgcgtctgatggcatctggcctgtttgatgaacacccgcgtctgaacattatcctgggtcatctgggcgaaggtctgccgtacatgatgtaccgtatcgatcatcgtatcgcatgggttaaagctccgccggattatccggcaaaacgtcgctttatggactacttcctcgaaaatttttggattaccacgtcaggcaacttccgtacccagacgctgattgatgcaatcctggaaattggtgctgatcgcatcctgttctcgaccgactggccgtttgaaaacattgatcatgccgctgactggtttgcggctacgtctattgccgaagctgaccgcgtcaaaatcggccgcaccaatgcccgtcgtctgttcaaactggatggccgt

SEQ ID NO: 1012 - DNA, 984 bp, Artificial Sequence
  synthetic construct; Dicamba decarboxylase variant
atggctcaaggcctggtggcactggaagaacatttcgcaatcccggaaacgctgcaagacgccgcaggtttcgtcccgggcgactactggaaagaactgcagcatcgtctgttggatatgcaagacactcgcctgaaagagatggataaacacgggatcggaacgatgattctgtccctggctgcaccggctgttcaggctattccagaccgtcgcaaagccattgaaatcgcacgtcgcgctaatgatttcctggcagaagaagttgctaaacgtccggaccgctttctggcattcgcagcactgccgctgcaggatgtggacgcagctaccgaagaactgcaacgttgtgtcgccgatctgggcttcgtgggtgcgatggttaatggcttcagccaggaaggcgatggtcaaaccccgctgtattacgacctgccgcagtatcgcccgttctggaaagaagtcgaaaaactggatgtgccgttttatctgcatccgcgtaacccgctgccgcaggatgcccgtatctacgacggtcacccgtggctgctgggtccgacctgggcgttcgcccaagaaacggcggtgcatgccctgcgtctgatggcatctggcctgtttgatgaacacccgcgtctgaacattatcctgggtcatatgggcgaaggtctgccgtacatgatgtaccgtatcgatcatcgtatcgcatgggttaaagctccgccggattatccggcaaaacgtcgctttatggactacttcctcgaaaattttcacattaccacgtcaggcaacttccgtacccagacgctgattgatgcaatcctggaaattggtgctgatcgcatcctgttctcgaccgactggccgtttgaaaacattgatcatgccgctgactggtttaatgctacgtctattgccgaagctgaccgtgtcaaaatcggccgcaccaatgcccgtaatctgttcaaactggatgtaagt

SEQ ID NO: 1013 - DNA, 984 bp, Artificial Sequence
  synthetic construct; Dicamba decarboxylase variant
atggctcaaggcctggtggcactggaagaacatttcgcaatcccggaaacgctgaatgacgccgcaggtttcgtcccgggctgctactggaaagaactgcagcatcgtctgatggatatgcacgaaacgcgcctgaaagagatggataaacacgggatcggaacgatggttctgtccctggctgcaccggctgttcaggcgattccggaccgtcgcaaagccattgaaatcgcacgtcgcgctaatgatttcctggcagaagaagttgctaaacgtccggaccgctttctggcattcgcagcactgccgatgcaggatccagacgcagctaccgaagaactgcaacgttgtgtcaacgatctgggcttcgtgggtgcgatggttaatggcttcagccaggaaggcgatggtcaaaccccgctgtattacgacctgccgcagtatcgcccgttctggggtgaagtcgaaaaactggatgtgccgttttatctgcatccgcgtaacccgctgccgcaggatgcccgtatctacgacggtcacccgtggctgctgggtccgacctgggcgttcgcccaagaaacggcggtgcatgccctgcgtctgatggcatctggcctgtttgatgaacacccgcgtctgaacattatcctgggtcatatgggcgaaggtctgccgtacatgatgtaccgtatcgatcatcgtatcgcatgggttaaagctccgccggattatccggcaaaacgtcgctttatggactacttcctcgaaaattttcacattaccacgtcaggcaacttccgtacccagacgctgattgatgcaatcctggaaattggtgctgatcgcatcctgttctcgaccgactggccgtttgaaaacattgatcatgccgctgactggtttaatgctacgtctattgccgaagctgaccgtgtcaaaatcggccgcaccaatgcccgtaatctgttcaaactggatggaagt

SEQ ID NO: 1014 - DNA, 984 bp, Artificial Sequence
  synthetic construct; Dicamba decarboxylase variant
atggctcaaggcaaagtggcactggaagaacatttcgcaatcccggaaacgctgaatgacgccgcaggtttcgtcccgggcgactactggaaagaactgcagcatcgtctgttggatatccaagacactcgcctgaaagagatggataaacacgagatcggaacgatgattctgtccctggctgcaccggctgttcaggctattccagaccgtcgcaaagccattgaaatcgcacgtcgcgctaatgatttcctggcagaagaagttgctaaacgtccggaccgctttctggcattcgcagcactgccgttgcaggatgtcgacgcagctacctccgaactgcaacgttgtgtcgccgatctgggcttcgtgggtgcgatggttaatggcttcagccaggaaggcgatggtcaaaccccgctgtattacgacctgccgcagtatcgcccgttctggggtgaagtcgaaaaactggatgtgccgttttatctgcatccgcgtaacccgctgccgcaggattcccgtatctacgacggtcacccgtggctgctgggtccgacctgggcgttcgcccaagaaacggcggtgcatgccctgcgtctgatggcatctggcctgtttgatgaacacccgcgtctgaacattatcctgggtcatctgggcgaaggtctgccgtacatgatgtaccgtatcgatcatcgtatcgcatgggttaaagctccgccgcgttatccggcaaaacgtcgctttatggactacttcctcgaaaattttcacattaccacgtcaggcaacttccgtacccagacgctgattgatgcaatcctggaaattggtgctgatcgcatcctgttctcgaccgactggccgtttgaaaacattgatcatgccgctgactggtttaatgctacgtctattgccgaagctgaccgtgtcaaaatcggccgcaccaatgcccgtcgtctgttcaaactggatgtacgt

SEQ ID NO: 1015 - DNA, 984 bp, Artificial Sequence
  synthetic construct; Dicamba decarboxylase variant
atggctcaaggcctggtggcactggaagaacatttcgcaatcccggaaacgctgcaagacgccgcaggtttcgtcccgggcgactactggaaagaactgcagcatcgtctgatggatatgcaagacacgcgcctgaaagagatggataaacacgggatcggaacgatggttctgtccctggctgcaccggctgttcaggctattccagaccgtcgccaagccattgaaattgcacgtcgcgctaatgatttcctggcagaagaagttgctaaacgtccggaccgctttctggcattcgcagcactgccgatgcaggatccagacgcagctaccgaagaactgcaacgttgtgtcgccgatctgggcttcgtgggtgcgatggttaatggcttcagccaggaaggcgatggtcaaaccccgctgtattacgacctgccgcagtatcgcccgttctggggtgaagtcgaaaaactggatgtgccgttttatctgcatccgcgtaacccgctgccgcaggatgcccgtatctacgacggtcacccgtggctgctgggtccgacctgggcgttcgcccaagaaacggcggtgcatgccctgcgtctgatggcatctggcctgtttgatgaacacccgcgtctgaacattatcctgggtcatatgggcgaaggtctgccgtacatgatgtaccgtatcgatcatcgtatcgcatgggttaaagctccgccgcgttatccggcaaaacgtcgctttatggactacttcctcgaaaattttcacattaccacgtcaggcaacttccgtacccagacgctgattgatgcaatcctggaaattggtgctgatcgcatcctgttctcgaccgactggccgtttgaaaacattgatcatgccgctgactggtttgcggctacgtctattgccgaagctgaccgtgtcaaaatcggccgcaccaatgcccgtcgtctgttcaaactggatgtacgt

SEQ ID NO: 1016 - DNA, 984 bp, Artificial Sequence
  synthetic construct; Dicamba decarboxylase variant
atggctcaaggcaaagtggcactggaagaacatttcgcaatcccggaaacgctgaatgacgccgcaggtttcgtcccgggcgactactggaaagaactgcagcatcgtctgctggatatccaagacactcgcctgaaagagatggataaacacgagatcggaacgatggttctgtccctggctgcaccggctgttcaggctattccagaccgtcgcaaagccattgaacttgcacgtcgcgctaatgatttcctggcagaagaagttgctaaacgtccggaccgctttctggcattcgcagcactgccgctgcaggatgtggacgcagctaccgaagaactgcaacgttgtgtcgccgatctgggcttcgtgggtgcgatggttaatggcttcagccaggaaggcgatggtcaaaccccgctgtattacgacctgccgcagtatcgcccgttctggggtgaagtcgaaaaactggatgtgccgttttatctgcatccgcgtaacccgctgccgcaggatgcccgtatctacgacggtcacccgtggctgctgggtccgacctgggcgttcgcccaagaaacggcggtgcatgccctgcgtctgatggcatctggcctgtttgatgaacacccgcgtctgaacattatcctgggtcatatgggcgaaggtctgccgtacatgatgtaccgtatcgatcatcgtatcgcatgggttaaagctccgccgcgttatccggcaaaacgtcgctttatggactacttcctcgaaaattttcacattaccacgtcaggcaacttccgtacccagacgctgattgatgcaatcctggaaattggtgctgatcgcatcctgttctcgaccgactggccgtttgaaaacattgatcatgccgctgactggtttgcggctacgtctattgccgaagctgaccgtgtcaaaatcggccgcaccaatgcccgtcgtctgttcaaactggatggccgt

SEQ ID NO: 1017 - DNA, 984 bp, Artificial Sequence
  synthetic construct; Dicamba decarboxylase variant
atggctcaaggcaaagtggcactggaagaacatttcgcaatcccggaaacgctgcaggacgccgcaggtttcgtcccgggcgactactggaaagaactgcagcatcgtctgttggatatccaagacgagcgcctgaaagagatggataaacacgagatcggaacgatgattctgtccctggctgcaccggctgttcaggcgattccggaccgtcgcaaagccattgaaatcgcacgtcgcgctaatgatttcctggcagaagaagttgctaaacgtccggaccgctttctggcattcgcagcactgccgttgcaggatgtcgacgcagctaccgaggaactgcaacgttgtgtcaacgatctgggcttcgtgggtgcgatggttaatggcttcagccaggaaggcgatggtcaaaccccgctgtattacgacctgccgcagtatcgcccgttctggggtgaagtcgaaaaactggatgtgccgttttatctgcatccgcgtaacccgctgccgcaggatgcccgtatctacgacggtcacccgtggctgctgggtccgacctgggcgttcgcccaagaaacggcggtgcatgccctgcgtctgatggcatctggcctgtttgatgaacacccgcgtctgaacattatcctgggtcatctgggcgaaggtctgccgtacatgatgtaccgtatcgatcatcgtatcgcatgggttaaagctccgccggattatccggcaaaacgtcgctttatggactacttcctcgaaaattttcacattaccacgtcaggcaacttccgtacccagacgctgattgatgcaatcctggaaattggtgctgatcgcatcctgttctcgaccgactggccgtttgaaaacattgatcatgccgctgactggtttgcggctacgtctattgccgaagctgaccgtgtcaaaatcggccgcaccaatgcccgtcgtctgttcaaactggatggccgt

SEQ ID NO: 1018 - DNA, 984 bp, Artificial Sequence
  synthetic construct; Dicamba decarboxylase variant
atggctcaaggcctggtggcactggaagaacatttcgcaatcccggaaacgctgcaggacgccgcaggtttcgtcccgggcgactactggaaagaactgcagcatcgtctgctggatatccaagacacgcgcctgaaagagatggataaacacgagatcggaacgatggttctgtccctggctgcaccggctgttcaggcgattccggaccgtcgcaaagccattgaaatcgcacgtcgcgctaatgatttcctggcagaagaagttgctaaacgtccggaccgctttctggcattcgcagcactgccgctgcaggatgtggacgcagctaccgaagaactgcaacgttgtgtcgccgatctgggcttcgtgggtgcgatggttaatggcttcagccaggaaggcgatggtcaaaccccgctgtattacgacctgccgcagtatcgcccgttctggggtgaagtcgaaaaactggatgtgccgttttatctgcatccgcgtaacccgctgccgcaggatgcccgtatctacgacggtcacccgtggctgctgggtccgacctgggcgttcgcccaagaaacggcggtgcatgccctgcgtctgatggcatctggcctgtttgatgaacacccgcgtctgaacattatcctgggtcatatgggcgaaggtctgccgtacatgatgtaccgtatcgatcatcgtatcgcatgggttaaagctccgccggattatccggcaaaacgtcgctttatggactacttcctcgaaaattttcacattaccacgtcaggcaacttccgtacccagacgctgattgatgcaatcctggaaattggtgctgatcgcatcctgttctcgaccgactggccgtttgaaaacattgatcatgccgctgactggtttaatgctacgtctattgccgaagctgaccgtgtcaaaatcggccgcaccaatgcccgtcgtctgttcaaactggatggacgt

SEQ ID NO: 1019 - DNA, 984 bp, Artificial Sequence
  synthetic construct; Dicamba decarboxylase variant
atggctcaaggcctggtggcactggaagaacatttcgcaatcccggaaacgctgaatgacgccgcagatttcgtcccgggcgactactggaaagaactgcagcatcgtctgctggatatccaagacactcgcctgaaagagatggataaacacgggatcggaacgatgattctgtccctggctgcaccggctgttcaggctattccagaccgtcgcaaagccattgaacttgcacgtcgcgctaatgatttcctggcagaagaagttgctaaacgtccggaccgctttctggcattcgcagcactgccgctgcaggatgtggacgcagctaccgaagaactgcaacgttgtgtcgccgatctgggcttcgtgggtgcgatggttaatggcttcagccaggaaggcgatggtcaaaccccgctgtattacgacctgccgcagtatcgcccgttctggggtgaagtcgaaaaactggatgtgccgttttatctgcatccgcgtaacccgctgccgcaggattcccgtatctacgacggtcacccgtggctgctgggtccgacctgggcgttcgcccaagaaacggcggtgcatgccctgcgtctgatggcatctggcctgtttgatgaacacccgcgtctgaacattatcctgggtcatatgggcgaaggtctgccgtacatgatgtaccgtatcgatcatcgtatcgcatgggttaaagctccgccggattatccggcaaaacgtcgctttatggactacttcctcgaaaattttcacattaccacgtcaggcaacttccgtacccagacgctgattgatgcaatcctggaaattggtgctgatcgcatcctgttctcgaccgactggccgtttgaaaacattgatcatgccgctgactggtttaatgctacgtctattgccgaagctgaccgtgtcaaaatcggccgcaccaatgcccgtcgtctgttcaaactggatggacgt

SEQ ID NO: 1020 - DNA, 984 bp, Artificial Sequence
  synthetic construct; Dicamba decarboxylase variant
atggctcaaggcaaagtggcactggaagaacatttcgcaatcccggaaacgctgcaggacgccgcaggtttcgtcccgggcgactactggaaagaactgcagcatcgtctgctggatatccaagacactcgcctgaaagagatggatcgtcacgagatcggaacgatggttctgtccctggctgcaccggctgttcaggctattccagaccgtcgcaaagccattgaaatcgcacgtcgcgctaatgatttcctggcagaagaagttgctaaacgtccggaccgctttctggcattcgcagcactgccgatgcaggatgtcgacgcagctaccgaggaactgcaacgttgtgtcaacgatctgggcttcgtgggtgcgatggttaatggcttcagccaggaaggcgatggtcaaaccccgctgtattacgacctgccgcagtatcgcccgttctggggtgaagtcgaaaaactggatgtgccgttttatctgcatccgcgtaacccgctgccgcaggattcccgtatctacgacggtcacccgtggctgctgggtccgacctgggcgttcgcccaagaaacggcggtgcatgccctgcgtctgatggcatctggcctgtttgatgaacacccgcgtctgaacattatcctgggtcatctgggcgaaggtctgccgtacatgatgtaccgtatcgatcatcgtatcgcatgggttaaagctccgccggattatccggcaaaacgtcgctttatggactacttcctcgaaaattttcacattaccacgtcaggcaacttccgtacccagacgctgattgatgcaatcctggaaattggtgctgatcgcatcctgttctcgaccgactggccgtttgaaaacattgatcatgccgctgactggtttaatgctacgtctattgccgaagctgaccgtgtcaaaatcggccgcaccaatgcccgtcgtctgttcaaactggatggccgt

SEQ ID NO: 1021 - DNA, 984 bp, Artificial Sequence
  synthetic construct; Dicamba decarboxylase variant
atggctcaaggcctggtggcactggaagaacatttcgcaatcccggaaacgctgcaagacgccgcaggtttcgtcccgggcgactactggaaagaactgcagcatcgtctgctggatatccaagacacgcgcctgaaagagatggataaacacgagatcggaacgatggttctgtccctggctgcaccggctgttcaggcgattccggaccgtcgcaaagccattgaaatcgcacgtcgcgctaatgatttcctggcagaagaagttgctaaacgtccggaccgctttctggcattcgcagcactgccgatgcaggatccagaagcagctaccgaagaactgcaacgttgtgtcgccgatctgggcttcgtgggtgcgatggttaatggcttcagccaggaaggcgatggtcaaaccccgctgtattacgacctgccgcagtatcgcccgttctggggtgaagtcgaaaaactggatgtgccgttttatctgcatccgcgtaacccgctgccgcaggattcccgtatctacgacggtcacccgtggctgctgggtccgacctgggcgttcgcccaagaaacggcggtgcatgccctgcgtctgatggcatctggcctgtttgatgaacacccgcgtctgaacattatcctgggtcatctgggcgaaggtctgccgtacatgatgtaccgtatcgatcatcgtatcgcatgggttaaagctccgccggattatccggcaaaacgtcgctttatggactacttcctcgaaaattttcacattaccacgtcaggcaacttccgtacccagacgctgattgatgcaatcctggaaattggtgctgatcgcatcctgttctcgaccgactggccgtttgaaaacattgatcatgccgctgactggtttgcggctacgtctattgccgaagctgaccgtgtcaaaatcggccgcaccaatgcccgtcgtctgttcaaactggatgtacgt

SEQ ID NO: 1022 - DNA, 984 bp, Artificial Sequence
  synthetic construct; Dicamba decarboxylase variant
atggctcaaggcctggtggcactggaagaacatttcgcaatcccggaaacgctgcaagacgccgcaggtttcgtcccgggcgactactggaaagaactgcagcatcgtctgttggatatccaagacacgcgcctgaaagagatggataaacacgagatcggaacgatggttctgtccctggctgcaccggctgttcaggcgattccggaccgtcgcaaagccattgaacttgcacgtcgcgctaatgatttcctggcagaagaagttgctaaacgtccggaccgctttctggcattcgcagcactgccgatgcaggatccagaagcagctaccgaggaactgcaacgttgtgtcgccgatctgggcttcgtgggtgcgatggttaatggcttcagccaggaaggcgatggtcaaaccccgctgtattacgacctgccgcagtatcgcccgttctggggtgaagtcgaaaaactggatgtgccgttttatctgcatccgcgtaacccgctgccgcaggatgcccgtatctacgacggtcacccgtggctgctgggtccgacctgggcgttcgcccaagaaacggcggtgcatgccctgcgtctgatggcatctggcctgtttgatgaacacccgcgtctgaacattatcctgggtcatctgggcgaaggtctgccgtacatgatgtaccgtatcgatcatcgtatcgcatgggttaaagctccgccggattatccggcaaaacgtcgctttatggactacttcctcgaaaattttcacattaccacgtcaggcaacttccgtacccagacgctgattgatgcaatcctggaaattggtgctgatcgcatcctgttctcgaccgactggccgtttgaaaacattgatcatgccgctgactggtttaatgctacgtctattgccgaagctgaccgtgtcaaaatcggccgcaccaatgcccgtcgtctgttcaaactggatggccgt

SEQ ID NO: 1023 - DNA, 984 bp, Artificial Sequence
  synthetic construct; Dicamba decarboxylase variant
atggctcaaggcctggtggcactggaagaacatttcgcaatcccggaaacgctgcaagacgccgcaggtttcgtcccgggcgactactggaaagaactgcagcatcgtctgctggatatccaagacactcgcctgaaagagatggataaacacgagatcggaacgatgattctgtccctggctgcaccggctgttcaggcgattccggaccgtcgcaaagccattgaaattgcaaaacgcgctaatgatttcctggcagaagaagttgctaaacgtccggaccgctttctggcattcgcagcactgccgctgcaggatgtcgaagcagctacctccgaactgcaacgttgtgtcaacgatctgggcttcgtgggtgcgatggttaatggcttcagccaggaaggcgatggtcaaaccccgctgtattacgacctgccgcagtatcgcccgttctggggtgaagtcgaaaaactggatgtgccgttttatctgcatccgcgtaacccgctgccgcaggattcccgtatctacgacggtcacccgtggctgctgggtccgacctgggcgttcgcccaagaaacggcggtgcatgccctgcgtctgatggcatctggcctgtttgatgaacacccgcgtctgaacattatcctgggccatatgggcgaaggtctgccgtacatgatgtaccgtatcgatcatcgtatcgcatgggttaaagctccgccgcgttatccggcaaaacgtcgctttatggactacttcctcgaaaattttcacattaccacgtcaggcaacttccgtacccagacgctgattgatgcaatcctggaaattggtgctgatcgcatcctgttctcgaccgactggccgtttgaaaacattgatcatgccgctgactggtttgcggctacgtctattgccgaagcagaccgtgtcaaaatcggccgcaccaatgcccgtcgtctgttcaaactggatgtaagt

SEQ ID NO: 1024 - DNA, 984 bp, Artificial Sequence
  synthetic construct; Dicamba decarboxylase variant
atggctcaaggcctggtggcactggaagaacatttcgcaatcccggaaacgctgcaagacgccgcaggtttcgtcccgggcgactactggaaagaactgcagcatcgtctgctggatatgcaagacacgcgcctgaaagagatggataaacacgggatcggaacgatgattctgtccctggctgcaccggctgttcaggcgattccggaccgtcgcaaagccattgaaatcgcacgtcgcgctaatgatttcctggcagaagaagttgctaaacgtccggaccgctttctggcattcgcagcactgccgctgcaggatccagaagcagctaccgaggaactgcaacgttgtgtcgccgatctgggcttcgtgggtgcgatggttaatggcttcagccaggaaggcgatggtcaaaccccgctgtattacgacctgccgcagtatcgcccgttctggggtgaagtcgaaaaactggatgtgccgttttatctgcatccgcgtaacccgctgccgcaggattcccgtatctacgacggtcacccgtggctgctgggtccgacctgggcgttcgcccaagaaacggcggtgcatgccctgcgtctgatggcatctggcctgtttgatgaacacccgcgtctgaacattatcctgggtcatatgggcgaaggtctgccgtacatgatgtaccgtatcgatcatcgtatcgcatgggttaaagctccgccggattatccggcaaaacgtcgctttatggactacttcctcgaaaattttcacattaccacgtcaggcaacttccgtacccagacgctgattgatgcaatcctggaaattggtgctgatcgcatcctgttctcgaccgactggccgtttgaaaacattgatcatgccgctgactggtttaatgctacgtctattgccgaagctgaccgtgttaaaatcggccgcaccaatgcccgtcgtctgttcaaactggatgtacgt

SEQ ID NO: 1025 - DNA, 984 bp, Artificial Sequence
  synthetic construct; Dicamba decarboxylase variant
atggctcaaggcctggtggcactggaagaacatttcgcaatcccggaaacgctgcaagacgccgcaggtttcgtcccgggcgactactggaaagaactgcagcatcgtctgctggatatccaagacactcgcctgaaagagatggataaacacgggatcggaacgatgattctgtccctggctgcaccggctgttcaggcgattccagaccgtcgccaagccattgaacttgcacgtcgcgctaatgatttcctggcagaagaagttgctaaacgtccggaccgctttctggcattcgcagcactgccgctgcaggatgtggacgcagctacctccgaactgcaacgttgtgtcgccgatctgggcttcgtgggtgcgatggttaatggcttcagccaggaaggcgatggtcaaaccccgctgtattacgacctgccgcagtatcgcccgttctggggtgaagtcgaaaaactggatgtgccgttttatctgcatccgcgtaacccgctgccgcaggatgcccgtatctacgacggtcacccgtggctgctgggtccgacctgggcgttcgcccaagaaacggcggtgcatgccctgcgtctgatggcatctggcctgtttgatgaacacccgcgtctgaacattatcctgggtcatctgggcgaaggtctgccgtacatgatgtaccgtatcgatcatcgtatcgcatgggttaaagctccgccggattatccggcaaaacgtcgctttatggactacttcctcgaaaattttcacattaccacgtcaggcaacttccgtacccagacgctgattgatgcaatcctggaaattggtgctgatcgcatcctgttctcgaccgactggccgtttgaaaacattgatcatgccgctgactggtttaatgctacgtctattgccgaagctgaccgtgtcaaaatcggccgcaccaatgcccgtcgtctgttcaaactggatggacgt

SEQ ID NO: 1026 - DNA, 984 bp, Artificial Sequence
  synthetic construct; Dicamba decarboxylase variant
atggctcaaggcaaagtggcactggaagaacatttcgcaatcccggaaacgctgcaagacgccgcaggtttcgtcccgggcgactactggaaagaactgcagcatcgtctgctggatatccaagacactcgcctgaaagagatggataaacacgagatcggaacgatgattctgtccctggctgcaccggctgttcaggcgattccggaccgtcgcaaagccattgaacttgcaaaacgcgctaatgatttcctggcagaagaagttgctaaacgtccggaccgctttctggcattcgcagcactgccgctgcaggatgtggacgcagctaccgaagaactgcaacgttgtgtcgccgatctgggcttcgtgggtgcgatggttaatggcttcagccaggaaggcgatggtcaaaccccgctgtattacgacctgccgcagtatcgcccgttctggggtgaagtcgaaaaactggatgtgccgttttatctgcatccgcgtaacccgctgccgcaggattcccgtatctacgacggtcacccgtggctgctgggtccgacctgggcgttcgcccaagaaacggcggtgcatgccctgcgtctgatggcatctggcctgtttgatgaacacccgcgtctgaacattatcctgggtcatatgggcgaaggtctgccgtacatgatgtaccgtatcgatcatcgtatcgcatgggttaaagctccgccggattatccggcaaaacgtcgctttatggactacttcctcgaaaatttttggattaccacgtcaggcaacttccgtacccagacgctgattgatgcaatcctggaaattggtgctgatcgcatcctgttctcgaccgactggccgtttgaaaacattgatcatgccgctgactggtttaatgctacgtctattgccgaagctgaccgtgtcaaaatcggccgcaccaatgcccgtcgtctgttcaaactggatggacgt

SEQ ID NO: 1027 - DNA, 984 bp, Artificial Sequence
  synthetic construct; Dicamba decarboxylase variant
atggctcaaggcctggtggcactggaagaacatttcgcaatcccggaaacgctgaatgacgccgcaggtttcgtcccgggcgactactggaaagaactgcagcatcgtctgctggatatccaagacacgcgcctgaaagagatggataaacacgggatcggaacgatggttctgtccctggctgcaccggctgttcaggcgattccggaccgtcgcaaagccattgaaattgcacgtcgcgctaatgatttcctggcagaagaagttgctaaacgtccggaccgctttctggcattcgcagcactgccgatgcaggatgtcgacgcagctaccgaggaactgcaacgttgtgtcaacgatctgggcttcgtgggtgcgatggttaatggcttcagccaggaaggcgatggtcaaaccccgctgtattacgacctgccgcagtatcgcccgttctggaaagaagtcgaaaaactggatgtgccgttttatctgcatccgcgtaacccgctgccgcaggattcccgtatctacgacggtcacccgtggctgctgggtccgacctgggcgttcgcccaagaaacggcggtgcatgccctgcgtctgatggcatctggcctgtttgatgaacacccgcgtctgaacattatcctgggtcatctgggcgaaggtctgccgtacatgatgtaccgtatcgatcatcgtatcgcatgggttaaagctccgccggattatccggcaaaacgtcgctttatggactacttcctcgaaaattttcacattaccacgtcaggcaacttccgtacccagacgctgattgatgcaatcctggaaattggtgctgatcgcatcctgttctcgaccgactggccgtttgaaaacattgatcatgccgctgactggtttgcggctacgtctattgccgaagctgaccgtgtcaaaatcggccgcaccaatgcccgtcgtctgttcaaactggatgtacgt

SEQ ID NO: 1028 - DNA, 984 bp, Artificial Sequence
  synthetic construct; Dicamba decarboxylase variant
atggctcaaggcctggtggcactggaagaacatttcgcaatcccggaaacgctgcaagacgccgcaggtttcgtcccgggcgactactggaaagaactgcagcatcgtctgttggatatccaagacactcgcctgaaagagatggataaacacgggatcggaacgatgattctgtccctggctgcaccggctgttcaggctattccagaccgtcgcaaagccattgaaattgcacgtcgcgctaatgatttcctggcagaagaagttgctaaacgtccggaccgctttctggcattcgcagcactgccgctgcaggatgtggacgcagctaccgaagaactgcaacgttgtgtcgccgatctgggcttcgtgggtgcgatggttaatggcttcagccaggaaggcgatggtcaaaccccgctgtattacgacctgccgcagtatcgcccgttctggaaagaagtcgaaaaactggatgtgccgttttatctgcatccgcgtaacccgctgccgcaggattcccgtatctacgacggtcacccgtggctgctgggtccgacctgggcgttcgcccaagaaacggcggtgcatgccctgcgtctgatggcatctggcctgtttgatgaacacccgcgtctgaacattatcctgggtcatctgggcgaaggtctgccgtacatgatgtaccgtatcgatcatcgtatcgcatgggttaaagctccgccggattatccggcaaaacgtcgctttatggactacttcctcgaaaattttcacattaccacgtcaggcaacttccgtacccagacgctgattgatgcaatcctggaaattggtgctgatcgcatcctgttctcgaccgactggccgtttgaaaacattgatcatgccgctgactggtttaatgctacgtctattgccgaagctgaccgtgtcaaaatcggccgcaccaatgcccgtcgtctgttcaaactggatggaagt

SEQ ID NO: 1029 - DNA, 984 bp, Artificial Sequence
  synthetic construct; Dicamba decarboxylase variant
atggctcaaggcctggtggcactggaagaacatttcgcaatcccggaaacgctgcaagacgccgcaggtttcgtcccgggcgactactggaaagaactgcagcatcgtctgttggatatccaagacacgcgcctgaaagagatggataaacacgggatcggaacgatgattctgtccctggctgcaccggctgttcaggcgattccggaccgtcgcaaagccattgaacttgcacgtcgcgctaatgatttcctggcagaagaagttgctaaacgtccggaccgctttctggcattcgcagcactgccgctgcaggatgtggacgcagctacctccgaactgcaacgttgtgtcgccgatctgggcttcgtgggtgcgatggttaatggcttcagccaggaaggcgatggtcaaaccccgctgtattacgacctgccgcagtatcgcccgttctggaaagaagtcgaaaaactggatgtgccgttttatctgcatccgcgtaacccgctgccgcaggatgcccgtatctacgacggtcacccgtggctgctgggtccgacctgggcgttcgcccaagaaacggcggtgcatgccctgcgtctgatggcatctggcctgtttgatgaacacccgcgtctgaacattatcctgggtcatctgggcgaaggtctgccgtacatgatgtaccgtatcgatcatcgtatcgcatgggttcatgctacgccgcgttatccggcaaaacgtcgctttatggactacttcctcgaaaattttcacattaccacgtcaggcaacttccgtacccagacgctgattgatgcaatcctggaaattggtgctgatcgcatcctgttctcgaccgactggccgtttgaaaacattgatcatgccgctgactggtttaatgctacgtctattgccgaagctgaccgtgtcaaaatcggccgcaccaatgcccgtcgtctgttcaaactggatgtacgt

SEQ ID NO: 1030 - DNA, 984 bp, Artificial Sequence
  synthetic construct; Dicamba decarboxylase variant
atggctcaaggcctggtggcactggaagaacatttcgcaatcccggaaacgctgcaggacgccgcaggtttcgtcccgggcgactactggaaagaactgcagcatcgtctgctggatatccaagacactcgcctgaaagagatggataaacacgggatcggaacgatggttctgtccctggctgcaccggctgttcaggcgattccggaccgtcgcaaagccattgaaatcgcacgtcgcgctaatgatttcctggcagaagaagttgctaaacgtccggaccgctttctggcattcgcagcactgccgctgcaggatgtggacgcagctaccgaggaactgcaacgttgtgtcgccgatctgggcttcgtgggtgcgatggttaatggcttcagccaggaaggcgatggtcaaaccccgctgtattacgacctgccgcagtatcgcccgttctggggtgaagtcgaaaaactggatgtgccgttttatctgcatccgcgtaacccgctgccgcaggatgcccgtatctacgacggtcacccgtggctgctgggtccgacctgggcgttcgcccaagaaacggcggtgcatgccctgcgtctgatggcatctggcctgtttgatgaacacccgcgtctgaacattatcctgggtcatctgggcgaaggtctgccgtacatgatgtaccgtatcgatcatcgtatcgcatgggttgaagctccgccggattatccggcaaaacgtcgctttatggactacttcctcgaaaattttcacattaccacgtcaggcaacttccgtacccagacgctgattgatgcaatcctggaaattggtgctgatcgcatcctgttctcgaccgactggccgtttgaaaacattgatcatgccgctgactggtttgcggctacgtctattgccgaagctgaccgtgtcaaaatcggccgcaccaatgcccgtcgtctgttcaaactggatggacgt

SEQ ID NO: 1031 - DNA, 984 bp, Artificial Sequence
  synthetic construct; Dicamba decarboxylase variant
atggctcaaggcctggtggcactggaagaacatttcgcaatcccggaaacgctgaatgacgccgcaggtttcgtcccgggcgactactggaaagaactgcagcatcgtctgttggatatccaagacgagcgcctgaaagagatggataaacacgggatcggaacgatgattctgtccctggctgcaccggctgttcaggcgattccggaccgtcgcaaagccattgaaattgcaaaacgcgctaatgatttcctggcagaagaagttgctaaacgtccggaccgctttctggcattcgcagcactgccgttgcaggatgtggacgcagctaccgaagaactgcaacgttgtgtcgccgatctgggcttcgtgggtgcgatggttaatggcttcagccaggaaggcgatggtcaaaccccgctgtattacgacctgccgcagtatcgcccgttctggaaagaagtcgaaaaactggatgtgccgttttatctgcatccgcgtaacccgctgccgcaggattcccgtatctacgacggtcacccgtggctgctgggtccgacctgggcgttcgcccaagaaacggcggtgcatgccctgcgtctgatggcatctggcctgtttgatgaacacccgcgtctgaacattatcctgggtcatatgggcgaaggtctgccgtacatgatgtaccgtatcgatcatcgtatcgcatgggttaaagctccgccgcgttatccggcaaaacgtcgctttatggactacttcctcgaaaatttttggattaccacgtcaggcaacttccgtacccagacgctgattgatgcaatcctggaaattggtgctgatcgcatcctgttctcgaccgactggccgtttgaaaacattgatcatgccgctgactggtttgcggctacgtctattgccgaagctgaccgtgtcaaaatcggccgcaccaatgcccgtcgtctgttcaaactggatgtaagt

SEQ ID NO: 1032 - DNA, 984 bp, Artificial Sequence
  synthetic construct; Dicamba decarboxylase variant
atggctcaaggcctggtggcactggaagaacatttcgcaatcccggaaacgctgcaggacgccgcaggtttcgtcccgggcgactactggaaagaactgcagcatcgtctgttggatatgcaagacgagcgcctgaaagagatggatcgtcacgggatcggaacgatggttctgtccctggctgcaccggctgttcaggcgattccggaccgtcgcaaagccattgaaatcgcacgtcgcgctaatgatttcctggcagaagaagttgctaaacgtccggaccgctttctggcattcgcagcactgccgttgcaggatgtcgacgcagctaccgaggaactgcaacgttgtgtcaacgatctgggcttcgtgggtgcgatggttaatggcttcagccaggaaggcgatggtcaaaccccgctgtattacgacctgccgcagtatcgcccgttctggggtgaagtcgaaaaactggatgtgccgttttatctgcatccgcgtaacccgctgccgcaggattcccgtatctacgacggtcacccgtggctgctgggtccgacctgggcgttcgcccaagaaacggcggtgcatgccctgcgtctgatggcatctggcctgtttgatgaacacccgcgtctgaacattatcctgggtcatctgggcgaaggtctgccgtacatgatgtaccgtatcgatcatcgtatcgcatgggttaaagctccgccggattatccggcaaaacgtcgctttatggactacttcctcgaaaatttttggattaccacgtcaggcaacttccgtacccagacgctgattgatgcaatcctggaaattggtgctgatcgcatcctgttctcgaccgactggccgtttgaaaacattgatcatgccgctgactggtttgcggctacgtctattgccgaagctgaccgtgtcaaaatcggccgcaccaatgcccgtaatctgttcaaactggatggccgt

SEQ ID NO: 1033 - DNA, 984 bp, Artificial Sequence
  synthetic construct; Dicamba decarboxylase variant
atggctcaaggcctggtggcactggaagaacatttcgcaatcccggaaacgctgaatgacgccgcaggtttcgtcccgggcgactactggaaagaactgcagcatcgtctgctggatatccaagacactcgcctgaaagagatggataaacacgagatcggaacgatggttctgtccctggctgcaccggctgttcaggcgattccggaccgtcgccaagccattgaacttgcaaaacgcgctaatgatttcctggcagaagaagttgctaaacgtccggaccgctttctggcattcgcagcactgccgttgcaggatgtcgaagcagctaccgaggaactgcaacgttgtgtcgccgatctgggcttcgtgggtgcgatggttaatggcttcagccaggaaggcgatggtcaaaccccgctgtattacgacctgccgcagtatcgcccgttctggaaagaagtcgaaaaactggatgtgccgttttatctgcatccgcgtaacccgctgccgcaggattcccgtatctacgacggtcacccgtggctgctgggtccgacctgggcgttcgcccaagaaacggcggtgcatgccctgcgtctgatggcatctggcctgtttgatgaacacccgcgtctgaacattatcctgggtcatatgggcgaaggtctgccgtacatgatgtaccgtatcgatcatcgtatcgcatgggttaaagctccgccggattatccggcaaaacgtcgctttatggactacttcctcgaaaattttcacattaccacgtcaggcaacttccgtacccagacgctgattgatgcaatcctggaaattggtgctgatcgcatcctgttctcgaccgactggccgtttgaaaacattgatcatgccgctgactggtttaatgctacgtctattgccgaagctgaccgtgtcaaaatcggccgcaccaatgcccgtcgtctgttcaaactggatggaagt

SEQ ID NO: 1034 - DNA, 984 bp, Artificial Sequence
  synthetic construct; Dicamba decarboxylase variant
atggctcaaggcctggtggcactggaagaacatttcgcaatcccggaaacgctgaatgacgccgcaggtttcgtcccgggcgactactggaaagaactgcagcatcgtctgttggatatccaagacactcgcctgaaagagatggataaacacgagatcggaacgatggttctgtccctggctgcaccggctgttcaggcgattccggaccgtcgccaagccattgaacttgcacgtcgcgctaatgatttcctggcagaagaagttgctaaacgtccggaccgctttctggcattcgcagcactgccgttgcaggatccagacgcagctaccgaggaactgcaacgttgtgtcgccgatctgggcttcgtgggtgcgatggttaatggcttcagccaggaaggcgatggtcaaaccccgctgtattacgacctgccgcagtatcgcccgttctggggtgaagtcgaaaaactggatgtgccgttttatctgcatccgcgtaacccgctgccgcaggatgcccgtatctacgacggtcacccgtggctgctgggtccgacctgggcgttcgcccaagaaacggcggtgcatgccctgcgtctgatggcatctggcctgtttgatgaacacccgcgtctgaacattatcctgggtcatatgggcgaaggtctgccgtacatgatgtaccgtatcgatcatcgtatcgcatgggttaaagctccgccgcgttatccggcaaaacgtcgctttatggactacttcctcgaaaattttcacattaccacgtcaggcaacttccgtacccagacgctgattgatgcaatcctggaaattggtgctgatcgcatcctgttctcgaccgactggccgtttgaaaacattgatcatgccgctgactggtttgcggctacgtctattgccgaagctgaccgtgtcaaaatcggccgcaccaatgcccgtcgtctgttcaaactggatggccgt

SEQ ID NO: 1035 - DNA, 984 bp, Artificial Sequence
  synthetic construct; Dicamba decarboxylase variant
atggctcaaggcctggtggcactggaagaacatttcgcaatcccggaaacgctgcaagacgccgcaggtttcgtcccgggcgactactggaaagaactgcagcatcgtctgctggatatccaagacactcgcctgaaagagatggataaacacgagatcggaacgatggttctgtccctggctgcaccggctgttcaggcgattccggaccgtcgcaaagccattgaacttgcaaaacgcgctaatgatttcctggcagaagaagttgctaaacgtccggaccgctttctggcattcgcagcactgccgttgcaggatgtcgacgcagctacctccgaactgcaacgttgtgtcgccgatctgggcttcgtgggtgcgatggttaatggcttcagccaggaaggcgatggtcaaaccccgctgtattacgacctgccgcagtatcgcccgttctggaaagaagtcgaaaaactggatgtgccgttttatctgcatccgcgtaacccgctgccgcaggatgcccgtatctacgacggtcacccgtggctgctgggtccgacctgggcgttcgcccaagaaacggcggtgcatgccctgcgtctgatggcatctggcctgtttgatgaacacccgcgtctgaacattatcctgggtcatatgggcgaaggtctgccgtacatgatgtaccgtatcgatcatcgtatcgcatgggttaaagctccgccggattatccggcaaaacgtcgctttatggactacttcctcgaaaattttcacattaccacgtcaggcaacttccgtacccagacgctgattgatgcaatcctggaaattggtgctgatcgcatcctgttctcgaccgactggccgtttgaaaacattgatcatgccgctgactggtttgcggctacgtctattgccgaagctgaccgtgtcaaaatcggccgcaccaatgcccgtcgtctgttcaaactggatggaagt

SEQ ID NO: 1036 - DNA, 984 bp, Artificial Sequence
  synthetic construct; Dicamba decarboxylase variant
atggctcaaggcctggtggcactggaagaacatttcgcaatcccggaaacgctgaatgacgccgcaggtttcgtcccgggcgactactggaaagaactgcagcatcgtctgatggatatccaagacacgcgcctgaaagagatggataaacacgagatcggaacgatggttctgtccctggctgcaccggctgttcaggcgattccggaccgtcgcaaagccattgaaatcgcacgtcgcgctaatgatttcctggcagaagaagttgctaaacgtccggaccgctttctggcattcgcagcactgccgctgcaggatccagacgcagctaccgaggaactgcaacgttgtgtcaacgatctgggcttcgtgggtgcgatggttaatggcttcagccaggaaggcgatggtcaaaccccgctgtattacgacctgccgcagtatcgcccgttctggggtgaagtcgaaaaactggatgtgccgttttatctgcatccgcgtaacccgctgccgcaggatgcccgtatctacgacggtcacccgtggctgctgggtccgacctgggcgttcgcccaagaaacggcggtgcatgccctgcgtctgatggcatctggcctgtttgatgaacacccgcgtctgaacattatcctgggtcatatgggcgaaggtctgccgtacatgatgtaccgtatcgatcatcgtatcgcatgggttaaagctccgccggattatccggcaaaacgtcgctttatggactacttcctcgaaaattttcacattaccacgtcaggcaacttccgtacccagacgctgattgatgcaatcctggaaattggtgctgatcgcatcctgttctcgaccgactggccgtttgaaaacattgatcatgccgctgactggtttaatgctacgtctattgccgaagctgaccgtgtcaaaatcggccgcaccaatgcccgtcgtctgttcaaactggatggaagt

SEQ ID NO: 1037 - DNA, 984 bp, Artificial Sequence
  synthetic construct; Dicamba decarboxylase variant
atggctcaaggcaaagtggcactggaagaacatttcgcaatcccggaaacgctgcaggacgccgcaggtttcgtcccgggcgactactggaaagaactgcagcatcgtctgctggatatccaagacactcgcctgaaagagatggataaacacgagatcggaacgatgattctgtccctggctgcaccggctgttcagggtattccagaccgtcgcaaagccattgaacttgcaaaacgcgctaatgatttcctggcagaagaagttgctaaacgtccggaccgctttctggcattcgcagcactgccgctgcaggatccagaagcagctaccgaggaactgcaacgttgtgtcaacgatctgggcttcgtgggtgcgatggttaatggcttcagccaggaaggcgatggtcaaaccccgctgtattacgacctgccgcagtatcgcccgttctggaaagaagtcgaaaaactggatgtgccgttttatctgcatccgcgtaacccgctgccgcaggattcccgtatctacgacggtcacccgtggctgctgggtccgacctgggcgttcgcccaagaaacggcggtgcatgccctgcgtctgatggcatctggcctgtttgatgaacacccgcgtctgaacattatcctgggtcatctgggcgaaggtctgccgtacatgatgtaccgtatcgatcatcgtatcgcatgggttaaagctccgccgcgttatccggcaaaacgtcgctttatggactacttcctcgaaaatttttggattaccacgtcaggcaacttccgtacccagacgctgattgatgcaatcctggaaattggtgctgatcgcatcctgttctcgaccgactggccgtttgaaaacattgatcatgccgctgactggtttgcggctacgtctattgccgaagctgaccgtgtcaaaatcggccgcaccaatgcccgtcgtctgttcaaactggatgtacgt

SEQ ID NO: 1038 - DNA, 984 bp, Artificial Sequence
  synthetic construct; Dicamba decarboxylase variant
atggctcaaggcaaagtggcactggaagaacatttcgcaatcccggaaacgctgaatgacgccgcaggtttcgtcccgggcgactactggaaagaactgcagcatcgtctgttggatatccaagacacgcgcctgaaagagatggataaacacgggatcggaacgatgattctgtccctggctgcaccggctgttcagggtattgtcgaccgtcgccaagccattgaaattgcaaaacgcgctaatgatttcctggcagaagaggttgctaaacgtccggaccgctttctggcattcgcagcactgccgctgcaggatccagacgcagctacctccgaactgcaacgttgtgtcgccgatctgggcttcgtgggtgcgatggttaatggcttcagccaggaaggcgatggtcaaaccccgctgtattacgacctgccgcagtatcgcccgttctggaaagaagtcgaaaaactggatgtgccgttttatctgcatccgcgtaacccgctgccgcaggatgcccgtatctacgacggtcacccgtggctgctgggtccgacctgggcgttcgcccaagaaacggcggtgcatgccctgcgtctgatggcatctggcctgtttgatgaacacccgcgtctgaacattatcctgggtcatatgggcgaaggtctgccgtacatgatgtaccgtatcgatcatcgtatcgcatgggttaaagctccgccggattatccggcaaaacgtcgctttatggactacttcctcgaaaattttcacattaccacgtcaggcaacttccgtacccagacgctgattgatgcaatcctggaaattggtgctgatcgcatcctgttctcgaccgactggccgtttgaaaacattgatcatgccgctgactggtttgcggctacgtctattgccgaagctgaccgtgtcaaaatcggccgcaccaatgcccgtcgtctgttcaaactggatgtacgt

SEQ ID NO: 1039 - DNA, 984 bp, Artificial Sequence
  synthetic construct; Dicamba decarboxylase variant
atggctcaaggcaaagtggcactggaagaacatttcgcaatcccggaaacgctgcaggacgccgcaggtttcgtcccgggcgactactggaaagaactgcagcatcgtctgatggatatccaagacacgcgcctgaaagagatggataaacacgagatcggaacgatggttctgtccctggctgcaccggctgttcaggcgattccggaccgtcgcaaagccattgaacttgcaaaacgcgctaatgatttcctggcagaagaagttgctaaacgtccggaccgctttctggcattcgcagcactgccgatgcaggatccagaagcagctaccgaggaactgcaacgttgtgtcgccgatctgggcttcgtgggtgcgatggttaatggcttcagccaggaaggcgatggtcaaaccccgctgtattacgacctgccgcagtatcgcccgttctggggtgaagtcgaaaaactggatgtgccgttttatctgcatccgcgtaacccgctgccgcaggatgcccgtatctacgacggtcacccgtggctgctgggtccgacctgggcgttcgcccaagaaacggcggtgcatgccctgcgtctgatggcatctggcctgtttgatgaacacccgcgtctgaacattatcctgggtcatatgggcgaaggtctgccgtacatgatgtaccgtatcgatcatcgtatcgcatgggttaaagctccgccggattatccggcaaaacgtcgctttatggactacttcctcgaaaatttttggattaccacgtcaggcaacttccgtacccagacgctgattgatgcaatcctggaaattggtgctgatcgcatcctgttctcgaccgactggccgtttgaaaacattgatcatgccgctgactggtttgcggctacgtctattgccgaagctgaccgtgtcaaaatcggccgcaccaatgcccgtaatctgttcaaactggatgtaagt

SEQ ID NO: 1040 - DNA, 984 bp, Artificial Sequence
  synthetic construct; Dicamba decarboxylase variant
atggctcaaggcctggtggcactggaagaacatttcgcaatcccggaaacgctgcaagacgccgcaggtttcgtcccgggcgactactggaaagaactgcagcatcgtctgctggatatccaagacacgcgcctgaaagagatggataaacacgagatcggaacgatggttctgtccctggctgcaccggctgttcaggcgattccggaccgtcgcaaagccattgaacttgcacgtcgcgctaatgatttcctggcagaagaagttgctaaacgtccggaccgctttctggcattcgcagcactgccgctgcaggatgtggacgcagctaccgaggaactgcaacgttgtgtcaacgatctgggcttcgtgggtgcgatggttaatggcttcagccaggaaggcgatggtcaaaccccgctgtattacgacctgccgcagtatcgcccgttctggaaagaagtcgaaaaactggatgtgccgttttatctgcatccgcgtaacccgctgccgcaggattcccgtatctacgacggtcacccgtggctgctgggtccgacctgggcgttcgcccaagaaacggcggtgcatgccctgcgtctgatggcatctggcctgtttgatgaacacccgcgtctgaacattatcctgggtcatctgggcgaaggtctgccgtacatgatgtaccgtatcgatcatcgtatcgcatgggttcatgctccgccggattatccggcaaaacgtcgctttatggactacttcctcgaaaattttcacattaccacgtcaggcaacttccgtacccagacgctgattgatgcaatcctggaaattggtgctgatcgcatcctgttctcgaccgactggccgtttgaaaacattgatcatgccgctgactggtttaatgctacgtctattgccgaagctgaccgtgtcaaaatcggccgcaccaatgcccgtcgtctgttcaaactggatgtacgt

SEQ ID NO: 1041 - protein, 328 aa, Artificial Sequence
  synthetic construct; Dicamba decarboxylase variant
  MISC_FEATURE (3)..(3): Xaa can be Gln, Gly, Met or Pro
  MISC_FEATURE (7)..(7): Xaa can be Ala or Cys
  MISC_FEATURE (12)..(12): Xaa can be Phe, Met, Val or Trp
  MISC_FEATURE (15)..(15): Xaa can be Pro or Thr
  MISC_FEATURE (16)..(16): Xaa can be Glu or Ala
  MISC_FEATURE (19)..(19): Xaa can be Gln, Glu or Asn
  MISC_FEATURE (20)..(20): Xaa can be Asp, Cys, Phe, Met or Trp
  MISC_FEATURE (21)..(21): Xaa can be Ser, Ala, Gly or Val
  MISC_FEATURE (23)..(23): Xaa can be Gly or Asp
  MISC_FEATURE (27)..(27): Xaa can be Gly, Ala, Asp, Glu, Pro, Arg, Ser, Thr or Tyr
  MISC_FEATURE (28)..(28): Xaa can be Asp, Cys, Glu, Phe or Gly
  MISC_FEATURE (30)..(30): Xaa can be Trp, Leu or Val
  MISC_FEATURE (32)..(32): Xaa can be Glu or Val
  MISC_FEATURE (34)..(34): Xaa can be Gln, Ala or Trp
  MISC_FEATURE (38)..(38): Xaa can be Leu, Ile, Met, Arg, Thr or Val
  MISC_FEATURE (40)..(40): Xaa can be Ile, Met, Ser or Val
  MISC_FEATURE (42)..(42): Xaa can be Asp, Ala, Gly, Lys, Met, Ser or Thr
  MISC_FEATURE (43)..(43): Xaa can be Thr, Cys, Asp, Glu, Gly, Met, Gln, Arg or Tyr
  MISC_FEATURE (46)..(46): Xaa can be Lys, Gly, Asn or Arg
  MISC_FEATURE (47)..(47): Xaa can be Leu, Cys, Glu, Lys or Ser
  MISC_FEATURE (50)..(50): Xaa can be Ala, Lys, Arg, Ser, Thr or Val
  MISC_FEATURE (52)..(52): Xaa can be Gly, Glu, Leu, Asn or Gln
  MISC_FEATURE (54)..(54): Xaa can be Glu or Gly
  MISC_FEATURE (55)..(55): Xaa can be Thr or Leu
  MISC_FEATURE (57)..(57): Xaa can be Ile, Ala or Val
  MISC_FEATURE (61)..(61): Xaa can be Asn, Ala, Gly, Leu or Ser
  MISC_FEATURE (63)..(63): Xaa can be Pro or Val
  MISC_FEATURE (64)..(64): Xaa can be Ala, Gly, His or Ser
  MISC_FEATURE (65)..(65): Xaa can be Val or Cys
  MISC_FEATURE (67)..(67): Xaa can be Ala or Ser
  MISC_FEATURE (68)..(68): Xaa can be Ile or Gln
  MISC_FEATURE (69)..(69): Xaa can be Pro, Gly, Arg, Ser or Val
  MISC_FEATURE (70)..(70): Xaa can be Asp or His
  MISC_FEATURE (72)..(72): Xaa can be Arg, Lys or Val
  MISC_FEATURE (73)..(73): Xaa can be Lys, Glu, Gln or Arg
  MISC_FEATURE (75)..(75): Xaa can be Ile or Arg
  MISC_FEATURE (76)..(76): Xaa can be Glu or Gly
  MISC_FEATURE (77)..(77): Xaa can be Ile, Met, Arg, Ser or Val
  MISC_FEATURE (79)..(79): Xaa can be Arg or Gln
  MISC_FEATURE (81)..(81): Xaa can be Ala or Ser
  MISC_FEATURE (84)..(84): Xaa can be Val, Cys, Phe or Met
  MISC_FEATURE (85)..(85): Xaa can be Leu or Ala
  MISC_FEATURE (88)..(88): Xaa can be Glu or Lys
  MISC_FEATURE (89)..(89): Xaa can be Cys, Ile or Val
  MISC_FEATURE (91)..(91): Xaa can be Lys or Arg
  MISC_FEATURE (92)..(92): Xaa can be Arg or Lys
  MISC_FEATURE (93)..(93): Xaa can be Pro, Ala or Arg
  MISC_FEATURE (94)..(94): Xaa can be Asp, Cys, Gly, Gln or Ser
  MISC_FEATURE (97)..(97): Xaa can be Leu, Lys or Arg
  MISC_FEATURE (100)..(100): Xaa can be Ala, Gly or Ser
  MISC_FEATURE (101)..(101): Xaa can be Ala or Gly
  MISC_FEATURE (102)..(102): Xaa can be Leu or Val
  MISC_FEATURE (104)..(104): Xaa can be Leu or Met
  MISC_FEATURE (105)..(105): Xaa can be Gln or Gly
  MISC_FEATURE (107)..(107): Xaa can be Pro or Val
  MISC_FEATURE (108)..(108): Xaa can be Asp or Glu
  MISC_FEATURE (109)..(109): Xaa can be Ala, Gly, Met or Val
  MISC_FEATURE (111)..(111): Xaa can be Thr, Ala, Cys, Gly, Ser or Val
  MISC_FEATURE (112)..(112): Xaa can be Glu, Gly, Arg or Ser
  MISC_FEATURE (117)..(117): Xaa can be Cys, Ala or Thr
  MISC_FEATURE (119)..(119): Xaa can be Asn, Ala, Cys, Arg or Ser
  MISC_FEATURE (120)..(120): Xaa can be Asp or Thr
  MISC_FEATURE (123)..(123): Xaa can be Phe or Leu
  MISC_FEATURE (127)..(127): Xaa can be Leu or Met
  MISC_FEATURE (133)..(133): Xaa can be Gln or Val
  MISC_FEATURE (137)..(137): Xaa can be Gly, Ala or Glu
  MISC_FEATURE (138)..(138): Xaa can be Gln or Gly
  MISC_FEATURE (147)..(147): Xaa can be Gln or Ile
  MISC_FEATURE (153)..(153): Xaa can be Gly or Lys
  MISC_FEATURE (167)..(167): Xaa can be Arg or Glu
  MISC_FEATURE (174)..(174): Xaa can be Ser or Ala
  MISC_FEATURE (178)..(178): Xaa can be Asp or Glu
  MISC_FEATURE (195)..(195): Xaa can be Ala or Gly
  MISC_FEATURE (212)..(212): Xaa can be Arg, Gly or Gln
  MISC_FEATURE (214)..(214): Xaa can be Asn or Gln
  MISC_FEATURE (220)..(220): Xaa can be Met or Leu
  MISC_FEATURE (228)..(228): Xaa can be Met or Leu
  MISC_FEATURE (229)..(229): Xaa can be Trp or Tyr
  MISC_FEATURE (235)..(235): Xaa can be Val or Ile
  MISC_FEATURE (236)..(236): Xaa can be Ala, Gly, Gln or Trp
  MISC_FEATURE (237)..(237): Xaa can be Trp or Leu
  MISC_FEATURE (238)..(238): Xaa can be Val, Gly or Pro
  MISC_FEATURE (239)..(239): Xaa can be Lys, Ala, Asp, Glu, Gly or His
  MISC_FEATURE (240)..(240): Xaa can be Leu, Ala, Asp, Glu, Gly or Val
  MISC_FEATURE (243)..(243): Xaa can be Arg, Ala, Asp, Lys, Ser or Val
  MISC_FEATURE (245)..(245): Xaa can be Pro or Ala
  MISC_FEATURE (248)..(248): Xaa can be Arg or Lys
  MISC_FEATURE (249)..(249): Xaa can be Arg or Pro
  MISC_FEATURE (251)..(251): Xaa can be Met or Val
  MISC_FEATURE (255)..(255): Xaa can be Asn, Ala, Leu, Met, Gln, Arg or Ser
  MISC_FEATURE (259)..(259): Xaa can be His or Trp
  MISC_FEATURE (260)..(260): Xaa can be Ile or Leu
  MISC_FEATURE (278)..(278): Xaa can be Ile or Leu
  MISC_FEATURE (298)..(298): Xaa can be Ser, Ala or Thr
  MISC_FEATURE (299)..(299): Xaa can be Asp or Ala
  MISC_FEATURE (302)..(302): Xaa can be Asn or Ala
  MISC_FEATURE (303)..(303): Xaa can be Ala, Cys, Asp, Glu or Ser
  MISC_FEATURE (304)..(304): Xaa can be Thr or Val
  MISC_FEATURE (312)..(312): Xaa can be Val or Leu
  MISC_FEATURE (316)..(316): Xaa can be Arg or Ser
  MISC_FEATURE (320)..(320): Xaa can be Arg or Leu
  MISC_FEATURE (321)..(321): Xaa can be Arg or Asn
  MISC_FEATURE (327)..(327): Xaa can be Gly, Leu, Gln or Val
  MISC_FEATURE (328)..(328): Xaa can be Ala, Cys, Asp, Arg, Ser, Thr or Val
MAXGKVXLEEHXAIXXTLXXXAXFVPXXYXKXLXHRLXDXQXXRLXXMDXHXIXXMXLSLXAXXXQXXXXRXXAXXXAXRXNDXXAEXXAXXXXRFXAFXXXPXXDXXXAXXELQRXVXXLGXVGAXVNGFSXEGDXXTPLYYDLPXYRPFWXEVEKLDVPFYLHPXNPLPQDXRIYXGHPWLLGPTWAFAQETXVHALRLMASGLFDEHPXLXIILGHXGEGLPYMXXRIDHRXXXXXXPPXYXAKXXFXDYFXENFXXTTSGNFRTQTLIDAILEXGADRILFSTDWPFENIDHAXXWFXXXSIAEADRXKIGXTNAXXLFKLDXX

SEQ ID NO: 1042 - protein, 328 aa, Artificial Sequence
  synthetic construct; Dicamba decarboxylase variant
  MISC_FEATURE (5)..(5): Xaa can be Lys or Leu
  MISC_FEATURE (16)..(16): Xaa can be Glu or Ala
  MISC_FEATURE (19)..(19): Xaa can be Gln or Asn
  MISC_FEATURE (21)..(21): Xaa can be Ser or Ala
  MISC_FEATURE (23)..(23): Xaa can be Gly or Asp
  MISC_FEATURE (27)..(27): Xaa can be Gly or Ser
  MISC_FEATURE (28)..(28): Xaa can be Asp, Cys or Glu
  MISC_FEATURE (30)..(30): Xaa can be Trp or Leu
  MISC_FEATURE (38)..(38): Xaa can be Leu or Met
  MISC_FEATURE (40)..(40): Xaa can be Ile or Met
  MISC_FEATURE (43)..(43): Xaa can be Thr, Glu or Gln
  MISC_FEATURE (46)..(46): Xaa can be Lys, Asn or Arg
  MISC_FEATURE (47)..(47): Xaa can be Leu or Glu
  MISC_FEATURE (50)..(50): Xaa can be Ala, Lys or Arg
  MISC_FEATURE (52)..(52): Xaa can be Gly, Glu or Gln
  MISC_FEATURE (54)..(54): Xaa can be Glu or Gly
  MISC_FEATURE (57)..(57): Xaa can be Ile or Val
  MISC_FEATURE (61)..(61): Xaa can be Asn or Ala
  MISC_FEATURE (63)..(63): Xaa can be Pro or Val
  MISC_FEATURE (64)..(64): Xaa can be Ala or Gly
  MISC_FEATURE (67)..(67): Xaa can be Ala, Gly or Ser
  MISC_FEATURE (69)..(69): Xaa can be Pro, Gly or Val
  MISC_FEATURE (72)..(72): Xaa can be Arg or Val
  MISC_FEATURE (73)..(73): Xaa can be Lys, Glu or Gln
  MISC_FEATURE (77)..(77): Xaa can be Ile or Leu
  MISC_FEATURE (79)..(79): Xaa can be Arg or Lys
  MISC_FEATURE (84)..(84): Xaa can be Val, Phe or Met
  MISC_FEATURE (89)..(89): Xaa can be Cys or Val
  MISC_FEATURE (94)..(94): Xaa can be Asp or Gly
  MISC_FEATURE (104)..(104): Xaa can be Leu or Met
  MISC_FEATURE (107)..(107): Xaa can be Pro or Val
  MISC_FEATURE (108)..(108): Xaa can be Asp or Glu
  MISC_FEATURE (111)..(111): Xaa can be Thr or Ser
  MISC_FEATURE (112)..(112): Xaa can be Glu or Ser
  MISC_FEATURE (117)..(117): Xaa can be Cys or Thr
  MISC_FEATURE (119)..(119): Xaa can be Asn, Ala or Arg
  MISC_FEATURE (120)..(120): Xaa can be Asp or Thr
  MISC_FEATURE (127)..(127): Xaa can be Leu or Met
  MISC_FEATURE (133)..(133): Xaa can be Gln or Val
  MISC_FEATURE (153)..(153): Xaa can be Gly or Lys
  MISC_FEATURE (174)..(174): Xaa can be Ser or Ala
  MISC_FEATURE (212)..(212): Xaa can be Arg or Gly
  MISC_FEATURE (214)..(214): Xaa can be Asn or Gln
  MISC_FEATURE (220)..(220): Xaa can be Met or Leu
  MISC_FEATURE (229)..(229): Xaa can be Trp or Tyr
  MISC_FEATURE (235)..(235): Xaa can be Asn or Ile
  MISC_FEATURE (236)..(236): Xaa can be Ala or Gly
  MISC_FEATURE (239)..(239): Xaa can be Lys, Glu or His
  MISC_FEATURE (240)..(240): Xaa can be Leu, Ala or Glu
  MISC_FEATURE (243)..(243): Xaa can be Arg or Asp
  MISC_FEATURE (245)..(245): Xaa can be Pro or Ala
  MISC_FEATURE (255)..(255): Xaa can be Asn or Leu
  MISC_FEATURE (259)..(259): Xaa can be His or Trp
  MISC_FEATURE (286)..(286): Xaa can be Ser or Ala
  MISC_FEATURE (298)..(298): Xaa can be Ser, Ala or Thr
  MISC_FEATURE (299)..(299): Xaa can be Asp or Ala
  MISC_FEATURE (302)..(302): Xaa can be Asn or Ala
  MISC_FEATURE (303)..(303): Xaa can be Ala or Glu
  MISC_FEATURE (304)..(304): Xaa can be Thr or Ala
  MISC_FEATURE (312)..(312): Xaa can be Val or Leu
  MISC_FEATURE (320)..(320): Xaa can be Arg or Leu
  MISC_FEATURE (321)..(321): Xaa can be Arg or Asn
  MISC_FEATURE (327)..(327): Xaa can be Gly, Leu or Val
  MISC_FEATURE (328)..(328): Xaa can be Ala, Asp, Arg, Ser or Thr
MAQGXVALEEHFAIPXTLXDXAXFVPXXYXKELQHRLXDXQDXRLXXMDXHXIXTMXLSLXAXXVQXIXDRXXAIEXAXRANDXLAEEXAKRPXRFLAFAALPXQDXXAAXXELQRXVXXLGFVGAXVNGFSXEGDGQTPLYYDLPQYRPFWXEVEKLDVPFYLHPRNPLPQDXRIYDGHPWLLGPTWAFAQETAVHALRLMASGLFDEHPXLXIILGHXGEGLPYMMXRIDHRXXWVXXPPXYXAKRRFMDYFXENFXITTSGNFRTQTLIDAILEIGADRILFXTDWPFENIDHAXXWFXXXSIAEADRXKIGRTNAXXLFKLDXX

1. A recombinant polypeptide having dicamba decarboxylase activity comprising:
(a) an amino acid sequence having a similarity score of at least 548 for any one of SEQ ID NO: 51, 89, 79, 81, 95, or 100, wherein the similarity score is generated using the BLAST alignment program, with the BLOSUM62 substitution matrix, a gap existence penalty of 11, and a gap extension penalty of 1;
(b) an amino acid sequence having at least 60%, 70%, 75%, 80% 90%, 95% or 100% sequence identity to any one of SEQ ID NOS: 1, 2, 4, 5, 16, 19, 21, 22, 26, 28, 30, 21, 32, 33, 34, 35, 36, 41, 43, 44, 46, 47, 48, 49, 50, 51, 52, 53, 54, 55, 56, 57, 58, 79, 81, 87, 88, 89, 91, 108, 109, 111, 112, 113, 114, 115, 116, 117, 118, 119, 120, 121, 122, 123, 124, 125, 126, 127, 128, or 129; or,
(c) an amino acid sequence having at least 60%, 70%, 75%, 80% 90%, or 95% sequence identity to SEQ ID NO: 1, 2, 4, 5, 16, 19, 21, 22, 26, 28, 30, 21, 32, 33, 34, 35, 36, 41, 43, 44, 46, 47, 48, 49, 50, 51, 52, 53, 54, 55, 56, 57, 58, 79, 81, 87, 88, 89, 91, 108, 109, 111, 112, 113, 114, 115, 116, 117, 118, 119, 120, 121, 122, 123, 124, 125, 126, 127, 128, or 129;
wherein the recombinant polypeptide comprises an active site having a catalytic residue geometry as set forth in Table 3 or having a substantially similar catalytic residue geometry;
wherein (a), (b), or (c) comprise the following amino acids:
(i) the amino acid residue in the encoded polypeptide that corresponds to amino acid position 27 of SEQ ID NO: 109 comprises alanine, serine, or threonine;
(ii) the amino acid residue in the encoded polypeptide that corresponds to amino acid position 38 of SEQ ID NO: 109 comprises isoleucine;
(iii) the amino acid residue in the encoded polypeptide that corresponds to amino acid position 42 of SEQ ID NO: 109 comprises alanine, methionine, or serine;
(iv) the amino acid residue in the encoded polypeptide that corresponds to amino acid position 52 of SEQ ID NO: 109 comprises glutamic acid;
(v) the amino acid residue in the encoded polypeptide that corresponds to amino acid position 61 of SEQ ID NO: 109 comprises alanine or serine;
(vi) the amino acid residue in the encoded polypeptide that corresponds to amino acid position 64 of SEQ ID NO: 109 comprises glycine, or serine;
(vii) the amino acid residue in the encoded polypeptide that corresponds to amino acid position 127 of SEQ ID NO: 109 comprises methionine;
(iix) the amino acid residue in the encoded polypeptide that corresponds to amino acid position 238 of SEQ ID NO: 109 comprises glycine;
(ix) the amino acid residue in the encoded polypeptide that corresponds to amino acid position 240 of SEQ ID NO: 109 comprises alanine, aspartic acid, or glutamic acid;
(x) the amino acid residue in the encoded polypeptide that corresponds to amino acid position 298 of SEQ ID NO: 109 comprises alanine or threonine,
(xi) the amino acid residue in the encoded polypeptide that corresponds to amino acid position 299 of SEQ ID NO: 109 comprises alanine;
(xii) the amino acid residue in the encoded polypeptide that corresponds to amino acid position 303 of SEQ ID NO: 109 comprises cysteine, glutamic acid, or serine;
(xiii) the amino acid residue in the encoded polypeptide that corresponds to amino acid position 327 of SEQ ID NO: 109 comprises leucine, glutamine, or valine;
(ixv) the amino acid residue in the encoded polypeptide that corresponds to amino acid position 328 of SEQ ID NO: 109 comprises aspartic acid, arginine, or serine; and/or,
(xv) the amino acid residue in the encoded protein that corresponds to the amino acid position of SEQ ID NO: 109 as set forth in Table 7 and corresponds to the specific amino acid substitution also set forth in Table 7 or any combination of residues denoted in Table 7.

2. A recombinant polypeptide having dicamba decarboxylase activity comprising an amino acid sequence of the formula:
```
(SEQ ID NO: 1041)
                                5 10
Met Ala Xaa Gly Lys Val Xaa Leu Glu Glu His Xaa
                15 20
Ala Ile Xaa Xaa Thr Leu Xaa Xaa Xaa Ala Xaa Phe
25 30 35
Val Pro Xaa Xaa Tyr Xaa Lys Xaa Leu Xaa His Arg
                        40 45
Leu Xaa Asp Xaa Gln Xaa Xaa Arg Leu Xaa Xaa Met
        50 55 60
Asp Xaa His Xaa Ile Xaa Xaa Met Xaa Leu Ser Leu
                                65 70
Xaa Ala Xaa Xaa Xaa Gln Xaa Xaa Xaa Xaa Arg Xaa
                75 80
Xaa Ala Xaa Xaa Xaa Ala Xaa Arg Xaa Asn Asp Xaa
85 90 95
Xaa Ala Glu Xaa Xaa Ala Xaa Xaa Xaa Xaa Arg Phe
                        100 105
Xaa Ala Phe Xaa Xaa Xaa Pro Xaa Xaa Asp Xaa Xaa
        110 115 120
Xaa Ala Xaa Xaa Glu Leu Gln Arg Xaa Val Xaa Xaa
                                125 130
Leu Gly Xaa Val Gly Ala Xaa Val Asn Gly Phe Ser
                135 140
Xaa Glu Gly Asp Xaa Xaa Thr Pro Leu Tyr Tyr Asp
145 150 155
Leu Pro Xaa Tyr Arg Pro Phe Trp Xaa Glu Val Glu
                        160 165
Lys Leu Asp Val Pro Phe Tyr Leu His Pro Xaa Asn
        170 175 180
Pro Leu Pro Gln Asp Xaa Arg Ile Tyr Xaa Gly His
                                185 190
Pro Trp Leu Leu Gly Pro Thr Trp Ala Phe Ala Gln
                195 200
Glu Thr Xaa Val His Ala Leu Arg Leu Met Ala Ser
205 210 215
Gly Leu Phe Asp Glu His Pro Xaa Leu Xaa Ile Ile
                        220 225
Leu Gly His Xaa Gly Glu Gly Leu Pro Tyr Met Xaa
        230 235 240
Xaa Arg Ile Asp His Arg Xaa Xaa Xaa Xaa Xaa Xaa
                                245 250
Pro Pro Xaa Tyr Xaa Ala Lys Xaa Xaa Phe Xaa Asp
                255 260
Tyr Phe Xaa Glu Asn Phe Xaa Xaa Thr Thr Ser Gly
265 270 275
Asn Phe Arg Thr Gln Thr Leu Ile Asp Ala Ile Leu
                        280 285
Glu Xaa Gly Ala Asp Arg Ile Leu Phe Ser Thr Asp
        290 295 300
Trp Pro Phe Glu Asn Ile Asp His Ala Xaa Xaa Trp
                                305 310
Phe Xaa Xaa Xaa Ser Ile Ala Glu Ala Asp Arg Xaa
                315 320
Lys Ile Gly Xaa Thr Asn Ala Xaa Xaa Leu Phe Lys
325
Leu Asp Xaa Xaa,
```
wherein
xaa at position 3 is Gln, Gly, Met or Pro;
xaa at position 7 is Ala or Gys;
xaa at position 12 is Phe, Met, Val or Trp;
xaa at position 15 is Pro or Thr;
xaa at position 16 is Glu or Ala;
xaa at position 19 is Gln, Glu or Asn;
xaa at position 20 is Asp, Cys, Phe, Met or Trp;
xaa at position 21 is Ser, Ala, Gly or Val;
xaa at position 23 is Gly, or Asp;
xaa at position 27 is Gly, Ala, Asp, Flu, Pro, Arg, Ser, Thr or Tyr;
xaa at position 28 is Asp, Cys, Glu, Phe or Gly;
xaa at position 30 is Trp, Leu or Val;
xaa at position 32 is Glu or Val;
xaa at position 34 is Gln, Ala or Trp;
xaa at position 38 is Leu, Ile, Met, Arg, Thr or Val;
xaa at position 40 is Ile, Met, Ser or Val;
xaa at position 42 is Asp, Ala, Gly, Lys, Met, Ser or Thr;
xaa at position 43 is Thr, Cys, Asp, Glu, Gly, Met, Gln, Arg or Tyr;
xaa at position 46 is Lys, Gly, Asn or Arg;
xaa at position 47 is Leu, Cys, Glu, Lys or Ser;
xaa at position 50 is Ala, Lys, Arg, Ser, Thr or Val;
xaa at position 52 is Gly, Glu, Leu, Asn or Gln;
xaa at position 54 is Glu or Gly;
xaa at position 55 is Thr or Leu;
xaa at position 57 is Ile, Ala or Val;
xaa at position 61 is Asn, Ala, Gly, Leu or Ser;
xaa at position 63 is Pro or Val;
xaa at position 64 is Ala, Gly, His or Ser;
xaa at position 65 is Val or Cys;
xaa at position 67 is Ala or Ser;
xaa at position 68 is Ile or Gln;
xaa at position 69 is Pro, Gly, Arg, Ser or Val;
xaa at position 70 is Asp or His;
xaa at position 72 is Arg, Lys or Val;
xaa at position 73 is Lys, Glu, Gln or Arg;
xaa at position 75 is Ile or Arg;
xaa at position 76 is Glu or Gly;
xaa at position 77 is Ile, Met, Arg, Ser or Val;
xaa at position 79 is Arg or Gln;
xaa at position 81 is Ala or Ser;
xaa at position 84 is Val, Cys, Phe or Met;
xaa at position 85 is Leu or Ala;
xaa at position 88 is Glu or Lys;
xaa at position 89 is Cys, Ile or Val;
xaa at position 91 is Lys or Arg;
xaa at position 92 is Arg or Lys;
xaa at position 93 is Pro, Ala or Arg;
xaa at position 94 is Asp, Cys, Gly, Gln or Ser;
xaa at position 97 is Leu, Lys or Arg;
xaa at position 100 is Ala, Gly or Ser;
xaa at position 101 is Ala or Gly;
xaa at position 102 is Leu or Val;
xaa at position 104 is Leu or Met;
xaa at position 105 is Gln or Gly;
xaa at position 107 is Pro or Val;
xaa at position 108 is Asp or Glu;
xaa at position 109 is Ala, Gly, Met or Val;
xaa at position 111 is Thr, Ala, Cys, Gly, Ser or Val;
xaa at position 112 is Glu, Gly, Arg or Ser;
xaa at position 117 is Cys, Ala or Thr;
xaa at position 119 is Asn, Ala, Cys, Arg or Ser;
xaa at position 120 is Asp or Thr;
xaa at position 123 is Phe or Leu;
xaa at position 127 is Leu or Met;
xaa at position 133 is Gln or Val;
xaa at position 137 is Gly, Ala or Glu;
xaa at position 138 is Gln or Gly;
xaa at position 147 is Gln or Ile;
xaa at position 153 is Gly or Lys;
xaa at position 167 is Arg or Glu;
xaa at position 174 is Ser or Ala;
xaa at position 178 is Asp or Glu;
xaa at position 195 is Ala or Gly;
xaa at position 212 is Arg, Gly or Gln;
xaa at position 214 is Asn or Gln;
xaa at position 220 is Met or Leu;
xaa at position 228 is Met or Leu;
xaa at position 229 is Trp or Tyr;
xaa at position 235 is Val or Ile;
xaa at position 236 is Ala, Gly, Gln or Trp;
xaa at position 237 is Trp or Leu;
xaa at position 238 is Val, Gly or Pro;
xaa at position 239 is Lys, Ala, Asp, Glu, Gly or His;
xaa at position 240 is Leu, Ala, Asp, Glu, Gly or Val;
xaa at position 243 is Arg, Ala, Asp, Lys, Ser or Val;
xaa at position 248 is Arg or Lys;
xaa at position 249 is Arg or Pro;
xaa at position 251 is Met or Val;
xaa at position 255 is Asn, Ala, Leu, Met, Gln, Arg or Ser;
xaa at position 259 is His or Trp;
xaa at position 260 is Ile or Leu;
xaa at position 278 is Ile or Leu;
xaa at position 298 is Ser, Ala or Thr;
xaa at position 299 is Asp or Ala;
xaa at position 302 is Asn or Ala;
xaa at position 303 is Ala, Cys, Asp, Glu or Ser;
xaa at position 304 is Thr or Val;
xaa at position 312 is Val or Leu;
xaa at position 316 is Arg or Ser;
xaa at position 320 is Arg or Leu;
xaa at position 321 is Arg or Asn;
xaa at position 327 is Glv, Leu, Gln or Val;
xaa at position 328 is Ala, Cys, Asp, Arg, Ser, Thr or Val;
wherein one or more amino acid(s) designated by Xaa in SEQ ID NO: 1041 is an amino acid different from the corresponding amino acid of SEQ ID NO: 109; and wherein the polypeptide having dicamba decarboxylase activity has increased dicamba decarboxylase activity compared to the polypeptide of SEQ ID NO: 109.

3. A recombinant polypeptide having dicamba decarboxylase activity comprising an amino acid sequence of the formula:
```
(SEQ ID NO: 1042)
                                5 10
Met Ala Gln Gly Xaa Val Ala Leu Glu Glu His Phe
                15 20
Ala Ile Pro Xaa Thr Leu Xaa Asp Xaa Ala Xaa Phe
25 30 35
Val Pro Xaa Xaa Tyr Xaa Lys Glu Leu Gln His Arg
                        40 45
Leu Xaa Asp Xaa Gln Asp Xaa Arg Leu Xaa Xaa Met
        50 55 60
Asp Xaa His Xaa Ile Xaa Thr Met Xaa Leu Ser Leu
                                65 70
Xaa Ala Xaa Xaa Val Gln Xaa Ile Xaa Asp Arg Xaa
                75 80
Xaa Ala Ile Glu Xaa Ala Xaa Arg Ala Asn Asp Xaa
85 90 95
Leu Ala Glu Glu Xaa Ala Lys Arg Pro Xaa Arg Phe
                        100 105
Leu Ala Phe Ala Ala Leu Pro Xaa Gln Asp Xaa Xaa
        110 115 120
Ala Ala Xaa Xaa Glu Leu Gln Arg Xaa Val Xaa Xaa
                                125 130
Leu Gly Phe Val Gly Ala Xaa Val Asn Gly Phe Ser
                135 140
Xaa Glu Gly Asp Gly Gln Thr Pro Leu Tyr Tyr Asp
145 150 155
Leu Pro Gln Tyr Arg Pro Phe Trp Xaa Glu Val Glu
                        160 165
Lys Leu Asp Val Pro Phe Tyr Leu His Pro Arg Asn
        170 175 180
Pro Leu Pro Gln Asp Xaa Arg Ile Tyr Asp Gly His
                                185 190
Pro Trp Leu Leu Gly Pro Thr Trp Ala Phe Ala Gln
                195 200
Glu Thr Ala Val His Ala Leu Arg Leu Met Ala Ser
205 210 215
Gly Leu Phe Asp Glu His Pro Xaa Leu Xaa Ile Ile
                        220 225
Leu Gly His Xaa Gly Glu Gly Leu Pro Tyr Met Met
        230 235 240
Xaa Arg Ile Asp His Arg Xaa Xaa Trp Val Xaa Xaa
                                245 250
Pro Pro Xaa Tyr Xaa Ala Lys Arg Arg Phe Met Asp
                255 260
Tyr Phe Xaa Glu Asn Phe Xaa Ile Thr Thr Ser Gly
265 270 275
Asn Phe Arg Thr Gln Thr Leu Ile Asp Ala Ile Leu
                        280 285
Glu Ile Gly Ala Asp Arg Ile Leu Phe Xaa Thr Asp
        290 295 300
Trp Pro Phe Glu Asn Ile Asp His Ala Xaa Xaa Trp
                                305 310
Phe Xaa Xaa Xaa Ser Ile Ala Glu Ala Asp Arg Xaa
                315 320
Lys Ile Gly Arg Thr Asn Ala Xaa Xaa Leu Phe Lys
325
Leu Asp Xaa Xaa
```
wherein one or more amino acid(s) designated by Xaa in SEQ ID NO: 1042 is an amino acid different from the corresponding amino acid of SEQ ID NO: 109; and wherein the polypeptide having dicamba decarboxylase activity has increased dicamba decarboxylase activity compared to the polypeptide of SEQ ID NO: 109.

4. The recombinant polypeptide of claim 2, wherein the amino acid position at 21 is Ser or Ala; the amino acid at position 27 is Gly or Ser; the amino acid at position 50 is Ala or Lys; the amino acid at position 52 is Gly or Glu; the amino acid at position 54 is Glu or Gly; the amino acid at position 61 is Asn or Ala; the amino acid at position 84 is Val or Phe; the amino acid at position 127 is Leu or Met; the amino acid at position 235 is Asn or Val or Ile; the amino acid at position 240 is Leu or Ala or Glu; the amino acid at position 298 is Ser or Ala or Thr; the amino acid at position 327 is Gly or Leu or Val; or the amino acid at position 328 is Ala or Arg or Asp or Ser; or combinations thereof.

5. The recombinant polypeptide of claim 2, further comprising substitution of one or more conservative amino acids, insertion of one or more amino acids, deletion of one or more amino acids, and combinations thereof.

6. The recombinant polypeptide of claim 2, wherein the dicamba decarboxylase activity is increased about 1.2 fold or greater compared to SEQ ID NO: 109.

7. The recombinant polypeptide of claim 2, wherein the dicamba decarboxylase activity is increased about 1.4 fold or greater compared to SEQ ID NO: 109.

8. The recombinant polypeptide of claim 2, wherein the dicamba decarboxylase activity is increased about 1.6 fold or greater compared to SEQ ID NO: 109.

9. The recombinant polypeptide of claim 2, wherein the dicamba decarboxylase activity is increased about 1.8 fold or greater compared to SEQ ID NO: 109.

10. The recombinant polypeptide of claim 2, wherein the dicamba decarboxylase activity is increased about 2.0 fold or greater compared to SEQ ID NO: 109.

11. The recombinant polypeptide of claim 2, wherein the dicamba decarboxylase activity is increased about 2.2 fold or greater compared to SEQ ID NO: 109.

12. The recombinant polypeptide of any of claim 1, wherein the polypeptide having dicamba decarboxylase activity has a k_{cat}/Kₘ of at least 0.0001 mM⁻¹ min⁻¹ for dicamba.

13. A polynucleotide construct comprising a nucleotide sequence encoding the polypeptide of claim 1.

14. The polynucleotide construct of claim 14, further comprising a promoter operably linked to the polynucleotide construct.

15. A cell comprising the polynucleotide construct of claim 13.

16. The cell of claim 15, wherein the cell comprises a microbial cell.

17. A method of producing a host cell comprising a heterologous polynucleotide encoding a polypeptide having dicamba decarboxylase activity comprising transforming a host cell with the polynucleotide construct of claim 13.

18. The method of claim 17, wherein the host cell comprises a microbial cell.

19. A method to decarboxylate dicamba, a dicamba derivative or a dicamba metabolite comprising contacting the dicamba, the dicamba derivative or the dicamba metabolite with a composition comprising an effective amount of the polypeptide of any of claims 1-12 or an effective amount of the host cell of claim 17, wherein the effective amount is sufficient to decarboxylate the dicamba, the dicamba derivative or the dicamba metabolite.

20. The method of claim 19, wherein the composition is contacted with dicamba.

21. A method for detecting a polypeptide comprising using an antibody or antibodies that specifically recognize a polypeptide having dicamba decarboxylase activity in an immunoassay; wherein the polypeptide recognized in the immunoassay comprises the polypeptide of claim 1.

22. A method for detecting the presence of a polynucleotide encoding a polypeptide having dicamba decarboxylase activity comprising detecting a polynucleotide encoding the polypeptide of claim 1 in a PCR amplification reaction.
